United States Patent Application Publication US 2025/0101390 A1 - sequence listing, part 2

SEQ ID NO: 2365 - protein, 789 aa, unidentified
  REGION 1..789: note = Description of Unknown: Synthetic polypeptide
MPRILKGFLIDADFETVEGRALIRLFLRGEEGSFVVYDDSFSPYFYALPGDEPERVKERILASGAAEAIQKVEIEEKRLFGTPRVALRITVSHPQDVPRIRERIRRVEGVDLILEHDILFVRRYLIDRGIKPLTWLRLEVEERDGRALLRGVEQLEEEPPELRVAAVAIAVYNPKGAPRSSKDEIIMISVATSDGVEKVLTWREVQGLEQVEVLQDEKEMLLRFAELIKEGDYDVIVGYNTDSFDFPYIRDRLKKLGISLPLGRLDAELEVSRRGALPEARIRGRAHVDLYPIVRRHVKLNSYVLESVVEELLGIKKEKLDGERRFTYWDEGGEKRALLARYALEDARVTLALAEKFLPLYLELSTIVGQSLNDVARMTSGQLVEWLLMRYATPRGELIPNHPAGEEYAARARATYAGGYVREPKRGLVEHIAVFDFRSFGPSIIVSHNIDPSTLIVGNCEENRAPELEYCFSLEREGFIPAILKELIRRRAEIKRELKRSEGDRRRTLSFAEKALKILANSFYGYMGYPRARWYRRECAESVAAFARMYIKQVMRIAEEEFKLEVVYGDTDSLFVVIPPEKRELAQKFLQKVNESMPGIIELEFEGFYRRGLFVTKKRYALLSEDGKMVVKGLEFVRRDWAPIARETQKEVLRILLEEADPEKAARLVRDVIERIRQRRVSLEDITIYTQLTKRIKSYKSLEPHVVAAQKLKERGREVAPGMIIGYIITKGTKGISQRATPVEFARLEDYDPEYYIDNQILPAIQRIFEAIGYTRDYLKEGITQTSLS

SEQ ID NO: 2366 - protein, 792 aa, unidentified
  REGION 1..792: note = Description of Unknown: Synthetic polypeptide
MPRILKGFLIDADFETVEGRALIRLFLRGEEGSFVVYDDSFSPYFYALPGDEPERVKERILASGAAEAIQKVEIEEKRLFGTPRVALRITVSHPQDVPRIRERIRRVEGVDLILEHDILFVRRYLIDRGIKPLTWLRLEVEERDGRALLRGVEQLEEEPPELRVAAVAIAVYNPKGAPRSSKDEIIMISVATSDGVEKVLTWREVQGLEQVEVLQDEKEMLLRFAELIKEGDYDVIVGYNTDSFDFPYIRDRLKKLGISLPLGRLDAELEVSRRGALPEARIRGRAHVDLYPIVRRHVKLNSYVLESVVEELLGIKKEKLDGERLFTYWDEGGEKRALLARYALEDARVTLALAEKFLPLYCELSTIVGQSLNDVARMTSGQLVEWLLMRYATPRGELIPNHPAGEEYAARARATYAGGYVREPKRGLVEHIAVFDFRSFGPSIIVSHNIDPSTLIVGNCEENRAPELEYCFSLEREGFIPAILKELIRRRAEIKRELKRSEGDRRRTLSFAEKALKILANSFYGYMGYPRARWYRRECAESVAAFARMYIKQVMRIAEEEFKLEVVYGDTDSLFVVIPPEKRELAQKFLQKVNESMPGIIELEFEGFYRRGLFVTKKRYALLSEDGKMVVKGLEFVRRDWAPIARETQKEVLRILLEEADPEKAARLVRDVIERIRQRRVSLEDITIYTQLTKRIKSYKSLEPHVVAAQKLKERGREVAPGMIIGYIITKGTKGISQRATPVEFARDEDYDPEYYIDNQILPAIQRIFEAIGYTRDYLKEGITQTSLSRWF

SEQ ID NO: 2367 - protein, 792 aa, unidentified
  REGION 1..792: note = Description of Unknown: Synthetic polypeptide
MPRILKGFLIDADFETVEGRALIRLFLRGEEGSFVVYDDSFSPYFYALPGDEPERVKERILASGAAEAIQKVEIEEKRLFGTPRVALRITVSHPQDVPRIRERIRRVEGVDLILEHDILFVRRYLIDRGIKPLTWLRLEVEERDGRALLRGVEQLEEEPPELRVAAVAIAVYNPKGAPRSSKDEIIMISVATSDGVEKVLTWREVQGLEQVEVLQDEKEMLLRFAELIKEGDYDVIVGYNTDSFDFPYIRDRLKKLGISLPLGRLDAELEVSRRGALPEARIRGRAHVDLYPIVRRHVKLNSYVLESVVEELLGIKKEKLDGERLFTYWDEGGEKRALLARYALEDARVTLALAEKFLPLYCELSTIVGQSLNDVARMTSGQLVEWLLMRYATPRGELIPNHPAGEEYAARARATYAGGYVREPKRGLVEHIAVFDFRSFGPSIIVSHNIDPSTLIVGNCEENRAPELEYCFSLEREGFIPAILKELIRRRAEIKRELKRSEGDRRRTLSFAEKALKILAKSFYGYMGYPRARWYRRECAESVAAFARMYIKQVMRIAEEEFKLEVVYGDTDSLFVVIPPEKRELAQKFLQKVNESMPGIIELEFEGFYRRGLFVTKKRYALLSEDGKMVVKGLEFVRRDWAPIARETQKEVLRILLEEADPEKAARLVRDVIERIRQRRVSLEDITIYTQLTKRIKSYKSLEPHVVAAQKLKERGREVAPGMIIGYIITKGTKGISQRATPVEFARLEDYDPEYYIDNQILPAIQRIFEAIGYTRDYLKEGITQTSLSRWF

SEQ ID NO: 2368 - protein, 792 aa, unidentified
  REGION 1..792: note = Description of Unknown: Synthetic polypeptide
MPRILKGFLIDADFETVEGRALIRLFLRGEEGSFVVYDDSFSPYFYALPGDEPERVKERILASGAAEAIQKVEIEEKRLFGTPRVALRITVSHPQDVPRIRERIRRVEGVDLILEHDILFVRRYLIDRGIKPLTWLRLEVEERDGRALLRGVEQLEEEPPELRVAAVAIAVYNPKGAPRSSKDEIIMISVATSDGVEKVLTWREVQGLEQVEVLQDEKEMLLRFAELIKEGDYDVIVGYNTDSFDFPYIRDRLKKLGISLPLGRLDAELEVSRRGALPEARIRGRAHVDLYPIVRRHVKLNNYVLESVVEELLGIKKEKLDGERLFTYWDEGGEKRALLARYALEDARVTLALAEKFLPLYLELSTIVGQSLNDVARMTSGQLVEWLLMRYATPRGELIPNHPAGEEYAARARATYAGGYVREPKRGLVEHIAVFDFRSFGPSIIVSHNIDPSTLIVGNCEENRAPELEYCFSLEREGFIPAILKELIRRRAEIKRELKRSEGDRRRTLSFAEKALKILANSFYGYMGYPRARWYRRECAESVAAFARMYIKQVMRIAEEEFKLEVVYGDTDSLFVVIPPEKRELAQKFLQKVNESMPGIIELEFEGFYRRGLFVTKKRYALLSEDGKMVVKGLEFVRRDWAPIARETQKEVLRILLEEADPEKAARLVRDVIERIRQRRVSLEDITIYTQLTKRIKSYKSLEPHVVAAQKLKERGREVAPGMIIGYIITKGTKGISQRATPVEFARLEDYDPEYYIDNQILPAIQRIFEAIGYTRDYLKEGITQTSLSRWF

SEQ ID NO: 2369 - protein, 792 aa, unidentified
  REGION 1..792: note = Description of Unknown: Synthetic polypeptide
MPRILKGFLIDADFETVEGRALIRLFLRGEEGSFVVYDDSFSPYFYALPGDEPERVKERILASGAAEAIQKVEIEEKRLFGTPRVALRITVSHPQDVPRIRERIRRVEGVDLILEHDILFVRRYLIDRGIKPLTWLRLEVEERDGRALLRGVEQLEEEPPELRVAAVAIAVYNPKGAPRSSKDEIIMISVATSDGVEKVLTWREVQGLEQVEVLQDEKEMLLRFAELIKEGDYDVIVGYNTDSFDFPYIRDRLKKLGISLPLGRLDAELEVSRRGALPEARIRGRAHVDLYPIVRRHVKLNSYVLESVVEELLGIKKEKLDGERLFTYWDEGGEKRALLARYALEDARVTLALAEKFLPLYCELSTIVGQSLNDVARMTSGQLVEWLLMRYATPRGELIPNHPAGEEYAARARATYAGGYVRKPKRGLVEHIAVFDFRSFGPSIIVSHNIDPSTLIVGNCEENRAPELEYCFSLEREGFIPAILKELIRRRAEIKRELKRSEGDRRRTLSFAEKALKILANSFYGYMGYPRARWYRRECAESVAAFARMYIKQVMRIAEEEFKLEVVYGDTDSLFVVIPPEKRELAQKFLQKVNESMPGIIELEFEGFYRRGLFVTKKRYALLSEDGKMVVKGLEFVRRDWAPIARETQKEVLRILLEEADPEKAARLVRDVIERIRQRRVSLEDITIYTQLTKRIKSYKSLEPHVVAAQKLKERGREVAPGMIIGYIITKGTKGISQRATPVEFARLEDYDPEYYIDNQILPAIQRIFEAIGYTRDYLKEGITQTSLSRWF

SEQ ID NO: 2370 - protein, 792 aa, unidentified
  REGION 1..792: note = Description of Unknown: Synthetic polypeptide
MPRILKGFLIDADFETVEGRALIRLFLRGEEGSFVVYDDSFSPYFYALPGDEPERVKERILASGAAEAIQKVEIEEKRLFGTPRVALRITVSHPQDVPRIRERIRRVEGVDLILEHDILFVRRYLIDRGIKPLTWLRLEVEERDGRALLRGVEQLEEEPPELRVAAVAIAVYNPKGAPRSSKDEIIMISVATSDGVEKVLTWREVQGLEQVEVLQDEKEMLLRFAELIKEGDYDVIVGYNTDSFDFPYIRDRLKKLGISLPLGRLDAELEVSRRGALPEARIRGRAHVDLYPIVRRHVKLNSDVLESVVEELLGIKKEKLDGERLFTYWDEGGEKRALLARYALEDARVTLALAEKFLPLYCELSTIVGQSLNDVARMTSGQLVEWLLMRYATPRGELIPNHPAGEEYAARARATYAGGYVREPKRGLVEHIAVFDFRSFGPSIIVSHNIDPSTLIVGNCEENRAPELEYCFSLEREGFIPAILKELIRRRAEIKRELKRSEGDRRRTLSFAEKALKILANSFYGYMGYPRARWYRRECAESVAAFARMYIKQVMRIAEEEFKLEVVYGDTDSLFVVIPPEKRELAQKFLQKVNESMPGIIELEFEGFYRRGLFVTKKRYALLSEDGKMVVKGLEFVRRDWAPIARETQKEVLRILLEEADPEKAARLVRDVIERIRQRRVSLEDITIYTQLTKRIKSYKSLEPHVVAAQKLKERGREVAPGMIIGYIITKGTKGISQRATPVEFARLEDYDPEYYIDNQILPAIQRIFEAIGYTRDYLKEGITQTSLSRWF

SEQ ID NO: 2371 - protein, 789 aa, unidentified
  REGION 1..789: note = Description of Unknown: Synthetic polypeptide
MPRILKGFLIDADFETVEGRALIRLFLRGEEGSFVVYDDSFSPYFYALPGDEPERVKERILASGAAEAIQKVEIEEKRLFGTPRVALRITVSHPQDVPRIRERIRRVEGVDLILEHDILFVRRYLIDRGIKPLTWLRLEVEERDGRALLRGVEQLEEEPPELRVAAVAIAVYNPKGAPRSSKDEIIMISVATSDGVEKVLTWREVQGLEQVEVLQDEKEMLLRFAELIKEGDYDVIVGYNTDSFDFPYIRDRLKKLGISLPLGRLDAELEVSRRGALPEARIRGRAHVDLYPIVRRHVKLNSYVLESVVEELLGIKKEKLDGERLFTYWDEGGEKRALLARYALEDARVTLALAEKFLPLYLELSTIVGQSLNDVARMTSGQLVEWLLMRYATPRGELAPNHPAGEEYAARARATYAGGYVREPKRGLVEHIAVFDFRSFGPSIIVSHNIDPSTLIVGNCEENRAPELEYCFSLEREGFIPAILKELIRRRAEIKRELKRSEGDRRRTLSFAEKALKILANSFYGYMGYPRARWYRRECAESVAAFARMYIKQVMRIAEEEFKLEVVYGDTDSLFVVIPPEKRELAQKFLQKVNESMPGIIELEFEGFYRRGLFVTKKRYALLSEDGKMVVKGLEFVRRDWAPIARETQKEVLRILLEEADPEKAARLVRDVIERIRQRRVSLEDITIYTQLTKRIKSYKSLEPHVVAAQKLKERGREVAPGMIIGYIITKGTKGISQRATPVEFARLEDYDPEYYIDNQILPAIQRIFEAIGYTRDYLKEGITQTSLS

SEQ ID NO: 2372 - protein, 792 aa, unidentified
  REGION 1..792: note = Description of Unknown: Synthetic polypeptide
MPRILKGFLIDADFETVEGRALIRLFLRGEEGSFVVYDDSFSPYFYALPGDEPERVKERILASGAAEAIQKVEIEEKRLFGTPRVALRITVSHPQDVPRIRERIRRVEGVDLILEHDILFVRRYLIDRGIKPLTWLRLEVEERDGRALLRGVEQLEEEPPELRVAAVAIAVYNPKGAPRSSKDEIIMISVATSDGVEKVLTWREVQGLEQVEVLQDEKEMLLRFAELIKEGDYDVIVGYNTDSFDFPYIRDRLKKLGISLPLGRLDAELEVSRRGALPEARIRGRAHVDLYPIVRRHVKLNSYVLESVVEELLGIKKEKLDGERLFTYWDEGGEKRALLARYALEDARVTLALAEKFLPLYCELSTIVGQSLNDVARMTSGQLVEWLLMRYATPRGELIPNHPAGEEYAARARATYAGGYVREPKRGLVEHIAVFDFRSFGPSIIVSHNIDPSTLIVGNCEENRAPELEYCFSLEREGFIPAILKELIRRRAEIKRELKRSEGDRRRTLSFAEKALKILANSFYGYMGYPRARWYRRECAESVAAFARMYIKQVMRIAEEEFKLEVVYGDTDSLFVVIPPEKRELAQKFLQKVNESMPGIIELEFEGFYRRGLFVTKKRYALLSEDGKMVVFGLEFVRRDWAPIARETQKEVLRILLEEADPEKAARLVRDVIERIRQRRVSLEDITIYTQLTKRIKSYKSLEPHVVAAQKLKERGREVAPGMIIGYIITKGTKGISQRATPVEFARLEDYDPEYYIDNQILPAIQRIFEAIGYTRDYLKEGITQTSLSRWF

SEQ ID NO: 2373 - protein, 792 aa, unidentified
  REGION 1..792: note = Description of Unknown: Synthetic polypeptide
MPRILKGFLIDADFETVEGRALIRLFLRGEEGSFVVYDDSFSPYFYALPGDEPERVKERILASGAAEAIQKVEIEEKRLFGTPRVALRITVSHPQDVPRIRERIRRVEGVDLILEHDILFVRRYLIDRGIKPLTWLRLEVEERDGRALLRGVEQLEEEPPELRVAAVAIAVYNPKGAPRSSKDEIIMISVATSDGVEKVLTWREVQGLEQVEVLQDEKEMLLRFAELIKEGDYDVIVGYNTDSFDFPYIRDRLKKLGISLPLGRLDAELEVSRRGALPEARIRGRAHVDLYPIVRRHVKLNSYVLESVVEELLGIKKEKLDGERLFTYWDEGGEKRALLARYALEDARVTLALAEKFLPLYCELSTIVGQSLNDVARMTSGQLVEWLLMRYATPRGELIPNHPAGEEYAARARATYAGGYVREPKRGLVEHIAVFDFRSFGPSIIVSHNIDPSTLIVGNCEENRAPELEYCFSLEREGFIPAILKELIRRRAEIKRELKRSEGDRRRTLSFAEKALKILANSFYGYMGYPRARWYRRECAESVAAFARMYIKQVMRIAEEEFKLEVVYGDTDSLFVVIPPEKRELAQRFLQKVNESMPGIIELEFEGFYRRGLFVTKKRYALLSEDGKMVVKGLEFVRRDWAPIARETQKEVLRILLEEADPEKAARLVRDVIERIRQRRVSLEDITIYTQLTKRIKSYKSLEPHVVAAQKLKERGREVAPGMIIGYIITKGTKGISQRATPVEFARLEDYDPEYYIDNQILPAIQRIFEAIGYTRDYLKEGITQTSLSRWF

SEQ ID NO: 2374 - protein, 792 aa, unidentified; identical to SEQ ID NO: 1760
  REGION 1..792: note = Description of Unknown: Synthetic polypeptide

SEQ ID NO: 2375 - protein, 792 aa, unidentified
  REGION 1..792: note = Description of Unknown: Synthetic polypeptide
MPRILKGFLIDADFETVEGRALIRLFLRGEEGSFVVYDDSFSPYFYALPGDEPERVKERILASGAAEAIQKVEIEEKRLFGTPRVALRITVSHPQDVPRIRERIRRVEGVDLILEHDILFVRRYLIDRGIKPLTWLRLEVEERDGRALLRGVEQLEEEPPELRVAAVAIAVYNPKGAPRSSKDEIIMISVATSDGVEKVLTWREVQGLEQVEVLQDEKEMLLRFAELIKEGDYDVIVGYNTDSFDFPYIRDRLKKLGISLPLGRLDAELEVSRRGALPEARIRGRAHVDLYPIVRRHVKLNSYVLESVVEELLGIKKEKLDGERLFTYWDEGGEKRALLARYALEDARVTLALAEKFLPLYCELSTIVGQSLNDVARMTSGQLVEWLLMRYATPRGELIPNHPAGEEYAARARATYAGGYVREPKRGLVEHIAVFDFRSFGPSIIVSHNIDPSTLIVGNCEENRAPELEYCFSLEREGFIPAILKELIRRRAEIKRELKRSEGDRRRTLSFAEKALKILANSFYGYMGYPRARWYRRECAESVAAFARMYIKQVMRIAEEEFKLEVVYGDTDSLFVVIPPEKRELAQKFLQKVNESMPGIIELEFEGFYRRGLFVTKKRYALLSEDGKMVVKGLEFVRRDAAPIARETQKEVLRILLEEADPEKAARLVRDVIERIRQRRVSLEDITIYTQLTKRIKSYKSLEPHVVAAQKLKERGREVAPGMIIGYIITKGTKGISQRATPVEFARLEDYDPEYYIDNQILPAIQRIFEAIGYTRDYLKEGITQTSLSRWF

SEQ ID NO: 2376 - protein, 792 aa, unidentified
  REGION 1..792: note = Description of Unknown: Synthetic polypeptide
MPRILKGFLIDADFETVEGRALIRLFLRGEEGSFVVYDDSFSPYFYALPGDEPERVKERILASGAAEAIQKVEIEEKRLFGTPRVALRITVSHPQDVPRIRERIRRVEGVDLILEHDILFVRRYLIDRGIKPLTWLRLEVEERDGRALLRGVEQLEEEPPELRVAAVAIAVYNPKGAPRSSKDEIIMISVATSDGVEKVLTWREVQGLEQVEVLQDEKEMLLRFAELIKEGDYDVIVGYNTDSFDFPYIRDRLKKLGISLPLGRLDAELEVSRRGALPEARIRGRAHVDLYPIVRRHVKLNSYDLESVVEELLGIKKEKLDGERLFTYWDEGGEKRALLARYALEDARVTLALAEKFLPLYCELSTIVGQSLNDVARMTSGQLVEWLLMRYATPRGELIPNHPAGEEYAARARATYAGGYVREPKRGLVEHIAVFDFRSFGPSIIVSHNIDPSTLIVGNCEENRAPELEYCFSLEREGFIPAILKELIRRRAEIKRELKRSEGDRRRTLSFAEKALKILANSFYGYMGYPRARWYRRECAESVAAFARMYIKQVMRIAEEEFKLEVVYGDTDSLFVVIPPEKRELAQKFLQKVNESMPGIIELEFEGFYRRGLFVTKKRYALLSEDGKMVVKGLEFVRRDAAPIARETQKEVLRILLEEADPEKAARLVRDVIERIRQRRVSLEDITIYTQLTKRIKSYKSLEPHVVAAQKLKERGREVAPGMIIGYIITKGTKGISQRATPVEFARLEDYDPEYYIDNQILPAIQRIFEAIGYTRDYLKEGITQTSLSRWF

SEQ ID NO: 2377 - protein, 792 aa, unidentified
  REGION 1..792: note = Description of Unknown: Synthetic polypeptide
MPRILKGFLIDADFETVEGRALIRLFLRGEEGSFVVYDDSFSPYFYALPGDEPERVKERILASGAAEAIQKVEIEEKRLFGTPRVALRITVSHPQDVPRIRERIRRVEGVDLILEHDILFVRRYLIDRGIKPLTWLRLEVEERDGRALLRGVEQLEEEPPELRVAAVAIAVYNPKGAPRSSKDEIIMISVATSDGVEKVLTWREVQGLEQVEVLQDEKEMLLRFAELIKEGDYDVIVGYNTDSFDFPYIRDRLKKLGISLPLGRLDAELEVSRRGALPEARIRGRAHVDLYPIVRRHVKLNSYVLESVVEELLGIKKEKLDGERLFTYWDEGGEKRALLARYALEDARVTLALAEKFLPLYCELSTIVGQSLNDVARMTSGQLVEWLLMRYATPRGELIPNHPAGEEYAARARATYAGGYVREPKRGLVEHIAVFDFRSFGPSIIVSHNIDPSTLIVGNCEENRAPELEYCFSLEREGFIPAILKELIRRRAEIKRELKRSEGDRRRTLSFAAKALKILANSFYGYMGYPRARWYRRECAESVAAFARMYIKQVMRIAEEEFKLEVVYGDTDSLFVVIPPEKRELAQKFLQKVNESMPGIIELEFEGFYRRGLFVTKKRYALLSEDGKMVVKGLEFVRRDWAPIARETQKEVLRILLEEADPEKAARLVRDVIERIRQRRVSLEDITIYTQLTKRIKSYKSLEPHVVAAQKLKERGREVAPGMIIGYIITKGTKGISQRATPVEFARLEDYDPEYYIDNQILPAIQRIFEAIGYTRDYLKEGITQTSLSRWF

SEQ ID NO: 2378 - protein, 792 aa, unidentified
  REGION 1..792: note = Description of Unknown: Synthetic polypeptide
MPRILKGFLIDADFETVEGRALIRLFLRGEEGSFVVYDDSFSPYFYALPGDEPERVKERILASGAAEAIQKVEIEEKRLFGTPRVALRITVSHPQDVPRIRERIRRVEGVDLILEHDILFVRRYLIDRGIKPLTWLRLEVEERDGRALLRGVEQLEEEPPELRVAAVAIAVYNPKGAPRSSKDEIIMISVATSDGVEKVLTWREVQGLEQVEVLQDEKEMLLRFAELIKEGDYDVIVGYNTDSFDFPYIRDRLKKLGISLPLGRLDAELEVSRRGALPEARIRGRAHVDLYPIVNRHVKLNSYDLESVVEELLGIKKEKLDGERLFTYWDEGGEKRALLARYALEDARVTLALAEKFLPLYCELSTIVGQSLNDVARMTSGQLVEWLLMRYATPRGELIPNHPAGEEYAARARATYAGGYVREPKRGLVEHIAVFDFRSFGPSIIVSHNIDPSTLIVGNCEENRAPELEYCFSLEREGFIPAILKELIRRRAEIKRELKRSEGDRRRTLSFAEKALKILANSFYGYMGYPRARWYRRECAESVAAFARMYIKQVMRIAEEEFKLEVVYGDTDSLFVVIPPEKRELAQKFLQKVNESMPGIIELEFEGFYRRGLFVTKKRYALLSEDGKMVVKGLEFVRRDWAPIARETQKEVLRILLEEADPEKAARLVRDVIERIRQRRVSLEDITIYTQLTKRIKSYKSLEPHVVAAQKLKERGREVAPGMIIGYIITKGTKGISQRATPVEFARLEDYDPEYYIDNQILPAIQRIFEAIGYTRDYLKEGITQTSLSRWF

SEQ ID NO: 2379 - protein, 792 aa, unidentified; identical to SEQ ID NO: 1760
  REGION 1..792: note = Description of Unknown: Synthetic polypeptide

SEQ ID NO: 2380 - protein, 792 aa, unidentified
  REGION 1..792: note = Description of Unknown: Synthetic polypeptide
MPRILKGFLIDADFETVEGRALIRLFLRGEEGSFVVYDDSFSPYFYALPGDEPERVKERILASGAAEAIQKVEVEEKRLFGTPRVALRITVSHPQDVPRIRERIRRVEGVDLILEHDILFVRRYLIDRGIKPLTWLRLEVEERDGRALLRGVEQLEEEPPELRVAAVAIAVYNPKGAPRSSKDEIIMISVATSDGVEKVLTWREVQGLEQVEVLQDEKEMLLRFAELIKEGDYDVIVGYNTDSFDFPYIRDRLKKLGISLPLGRLDAELEVSRRGALPEARIRGRAHVDLYPIVRRHVKLNSYVLESVVEELLGIKKEKLDGERLFTYWDEGGEKRALLARYALEDARVTLALAEKFLPLYCELSTIVGQSLNDVARMTSGQLVEWLLMRYATPRGELIPNHPAGEEYAARARATYAGGYVREPKRGLVEHIAVFDFRSFGPSIIVSHNIDPSTLIVGNCEENRAPELEYCFSLEREGFIPAILKELIRRRAEIKRELKRSEGDRRRTLSFAEKALKILANSFYGYMGYPRARWYRRECAESVAAFARMYIKQVMRIAEEEFKLEVVYGDTDSLFVVIPPEKRELAQKFLQKVNESMPGIIELEFEGFYRRGLFVTKKRYALLSEDGKMVVKGLEFVRRDWAPIARETQKEVLRILLEEADPEKAARLVRDVIERIRQRRVSLEDITIYTQLTKRIKSYKSLEPHVVAAQKLKERGREVAPGMIIGYIITKGTKGISQRATPVEFARLEDYDPEYYIDNQILPAIQRIFEAIGYTRDYLKEGITQTSLSRWF

SEQ ID NO: 2381 - protein, 792 aa, unidentified
  REGION 1..792: note = Description of Unknown: Synthetic polypeptide
MPRILKGFLIDADFETVEGRALIRLFLRGEEGSFVVYDDSFSPYFYALPGDEPERVKERILASGAAEAIQKVEIEEKRLFGTPRVALRITVSHPQDVPRIRERIRRVEGVDLILEHDILFVRRYLIDRGIKPLTWLRLEVEERDGRALLRGVEQLEEEPPELRVAAVAIAVYNPKGAPRSSKDEIIMISVATSDGVEKVLTWREVQGLEQVEVLQDEKEMLLRFAELIKEGDYDVIVGYNTDSFDFPYIRDRLKKLGISLPLGRLDAELEVSRRGALPEARIRGRAHVDLYPIVRRHVKLNSYVLESVVEELLGIKKEKLDGERLFTYWDEGGEKRALLARYALEDARVTLALAEKFLPLYCELSTIVGQSLNDVARMTSGQLVEWLLMRYATPRGELIPNHPAGEEYAARARATYAGGYVREPKRGLVEHIAVFDFRSFGPSIIVSHNIDPSTLIVGNCEENRAPELEYCFSLEREGFIPAILKELIRRRAEIKRELKRSEGDRRRTLSFAEKALKILANSFYGYMGYPRARWYRRECAESVAAFARMYIKQVMRIAEEEFKLEVVYGDTDSLFVVIPPEKRELAQKFLQKVNESMPGIIELEFEGFYRRGLFVTKKRYALLSEDGKMVVKGLEFVRRDWAPIARETQKEVLRILLEEADPEKAARLVRDVIERIRQRRVSLEDITIYSQLTKRIKSYKSLEPHVVAAQKLKERGREVAPGMIIGYIITKGTKGISQRATPVEFARLEDYDPEYYIDNQILPAIQRIFEAIGYTRDYLKEGITQTSLSRWF

SEQ ID NO: 2382 - protein, 792 aa, unidentified
  REGION 1..792: note = Description of Unknown: Synthetic polypeptide
MPRILKGFLIDADFETVEGRALIRLFLRGEEGSFVVYDDSFSPYFYALPGDEPERVKERILASGAAEAIQKVEIEEKRLFGTPRVALRITVSHPQDVPRIRERIRRVEGVDLILEHDILFVRRYLIDRGIKPLTWLRLEVEERDGRALLRGVEQLEEEPPELRVAAVAIAVYNPKGAPRSSKDEIIMISVATSDGVEKVLTWREVQGLEQVEVLQDEKEMLLRFAELIKEGDYDVIVGYNTDSFDFPYIRDRLKKLGISLPLGRLDAELEVSRRGALPEARIRGRAHVDLYPIVARHVKLNSYVLESVVEELLGIKKEKLDGERLFTYWDEGGEKRALLARYALEDARVTLALAEKFLPLYCELSTIVGQSLNDVARMTSGQLVEWLLMRYATPRGELIPNHPAGEEYAARARATYAGGYVREPKRGLVEHIAVFDFRSFGPSIIVSHNIDPSTLIVGNCEENRAPELEYCFSLEREGFIPAILKELIRRRAEIKRELKRSEGDRRRTLSFAEKALKILANSFYGYMGYPRARWYRRECAESVAAFARMYIKQVMRIAEEEFKLEVVYGDTDSLFVVIPPEKRELAQKFLQKVNESMPGIIELEFEGFYRRGLFVTKKRYALLSEDGKMVVKGLEFVRRDWAPIARETQKEVLRILLEEADPEKAARLVRDVIERIRQRRVSLEDITIYTQLTKRIKSYKSLEPHVVAAQKLKERGREVAPGMIIGYIITKGTKGISQRATPVEFARLEDYDPEYYIDNQILPAIQRIFEAIGYTRDYLKEGITQTSLSRWF

SEQ ID NO: 2383 - protein, 792 aa, unidentified; identical to SEQ ID NO: 2253
  REGION 1..792: note = Description of Unknown: Synthetic polypeptide

SEQ ID NO: 2384 - protein, 792 aa, unidentified
  REGION 1..792: note = Description of Unknown: Synthetic polypeptide
MPRILKGFLIDADFETVEGRALIRLFLRGEEGSFVVYDDSFSPYFYALPGDEPERVKERILASGAAEAIQKVEIEEKRLFGTPRVALRITVSHPQDVPRIRERIRRVEGVDLILEHDILFVRRYLIDRGIKPLTWLRLEVEERDGRALLRGVEQLEEEPPELRVAAVAIAVYNPKGAPRSSKDEIIMISVATSDGVEKVLTWREVQGLEQVEVLQDEKEMLLRFAELIKEGDYDVIVGYNTDSFDFPYIRDRLKKLGISLPLGRLDAELEVSRRGALPEARIRGRAHVDLYPIVRRHVKLNSYVLESVVEELLGIKKEKLDGERLFTYWDEGGEKRALLARYALEDARVTLALAEKFLPLYCELSTIVGQSLNDVARMTSGQLVEWLLMRYATPRGELIPNHPAGEEYAARARATYAGGYVREPKRGLVEHIAVFDFRSFGPSIIVSHNIDPSTLIVGNCEENRAPELEYCFSLEREGFIPAILKELIRRRAEIKRELKRSEGDRRRTLSFAEKALKILANSFYGYMGYPRARWYRRECAESVAAFARMYIKQVMRIAEEEFKLEVVYGDTDSLFVVIPPEKRELAQKFLQAVNESMPGIIELEFEGFYRRGLFVTKKRYALLSEDGKMVVKGLEFVRRDWAPIARETQKEVLRILLEEADPEKAARLVRDVIERIRQRRVSLEDITIYTQLTKRIKSYKSLEPHVVAAQKLKERGREVAPGMIIGYIITKGTKGISQRATPVEFARLEDYDPEYYIDNQILPAIQRIFEAIGYTRDYLKEGITQTSLSRWF

SEQ ID NO: 2385 - protein, 792 aa, unidentified
  REGION 1..792: note = Description of Unknown: Synthetic polypeptide
MPRILKGFLIDADFETVEGRALIRLFLRGEEGSFVVYDDSFSPYFYALPGDEPERVKERILASGAAEAIQKVEIEEKRLFGTPRVALRITVSHPQDVPRIRERIRRVEGVDLILEHDILFVRRYLIDRGIKPLTWLRLEVEERDGRALLRGVEQLEEEPPELRVAAVAIAVYNPKGAPRSSKDEIIMISVATSDGVEKVLTWREVQGLEQVEVLQDEKEMLLRFAELIKEGDYDVIVGYNTDSFDFPYIRDRLKKLGISLPLGRLDAELEVSRRGALPEARIRGRAHVDLYPIVRRHVKLNSYVLESVVEELLGIKKEKLDGERLFTYWDEGGEKRALLARYALEDARVTLALAEKFLPLYCELSTIVGQSLNDVARMTSGQLVEWLLMRYATPRGELIPNHPAGEEYAARARATYAGGYVREPKRGLVEHIAVFDFRSFGPSIIVSHNIDPSTLIVGNCEENRAPELEYCFSLEREGFIPAILKELIRRRAEIKRELKRSEGDRRRTLSFAEKALKILANSFYGYMGYPRARWYRRECAESVAAFARMYIKQVMRIAEEEFKLEVVYGDTDSLFVVIPPEKRELAQKFLQKVNESMPGIIELEFEGFYRRGLFVTKKRYALLSEDGKMVVKGLEFVRRDWAPIARETQKEVLRILLEEADPEKAARLVRDVIERIRQRRVSLEDITIYTQLTKRIKSYKSLEPHVVAAQKLKERGREVAPGMIIGYIITKGTKKISQRATPVEFARLEDYDPEYYIDNQILPAIQRIFEAIGYTRDYLKEGITQTSLSRWF

SEQ ID NO: 2386 - protein, 792 aa, unidentified
  REGION 1..792: note = Description of Unknown: Synthetic polypeptide
MPRILKGFLIDADFETVEGRALIRLFLRGEEGSFVVYDDSFSPYFYALPGDEPERVKERILASGAAEAIQKVEIEEKRLFGTPRVALRITVSHPQDVPRIRERIRRVEGVDLILEHDILFVRRYLIDRGIKPLTWLRLEVEERDGRALLRGVEQLEEEPPELRVAAVAIAVYNPKGAPRSSKDEIIMISVATSDGVEKVLTWREVQGLEQVEVLQDEKEMLLRFAELIKEGDYDVIVGYNTDSFDFPYIRDRLKKLGISLPLGRLDAELEVSRRGALPEARIRGRAHVDLYPIVRRHVKLNSYVLESVVEELLGIKKEKLDGERLFTYWDEGGEKRALLARYALEDARVTLALAEKFLPLYCELSTIVGQSLNDVARMTSGQLVEWLLMRYATPRGELIPNHPAGEEYAARARATYAGGYVREPKRGLVEHIAVFDFRSFGPSIIVSHNIDPSTLIVGNCEENRAPELEYCFSLEREGFIPAILKELIRRRAEIKRELKRSEGDRRRTLSFAEKALKILANSFYGYLGYPRARWYRRECAESVAAFARMYIKQVMRIAEEEFKLEVVYGDTDSLFVVIPPEKRELAQKFLQKVNESMPGIIELEFEGFYRRGLFVTKKRYALLSEDGKMVVKGLEFVRRDWAPIARETQKEVLRILLEEADPEKAARLVRDVIERIRQRRVSLEDITIYTQLTKRIKSYKSLEPHVVAAQKLKERGREVAPGMIIGYIITKGTKGISQRATPVEFARLEDYDPEYYIDNQILPAIQRIFEAIGYTRDYLKEGITQTSLSRWF

SEQ ID NO: 2387 - protein, 792 aa, unidentified
  REGION 1..792: note = Description of Unknown: Synthetic polypeptide
MPRILKGFLIDADFETVEGRALIRLFLRGEEGSFVVYDDSFSPYFYALPGDEPERVKERILASGAAEAIQKVEIEEKRLFGTPRVALRITVSHPQDVPRIRERIRRVEGVDLILEHDILFVRRYLIDRGIKPLTWLRLEVEERDGRALLRGVEQLEEEPPELRVAAVAIAVYNPKGAPRSSKDEIIMISVATSDGVEKVLTWREVQGLEQVEVLQDEKEMLLRFAELIKEGDYDVIVGYNTDSFDFPYIRDRLKKLGISLPLGRLDAELEVSRRGALPEARIRGRAHVDLYPIVRRHVKLNSYVLESVVEELLGIKKEKLDGERLFTYWDEGGEKRALLARYALEDARVTLALAEKFLPLYCELSTIVGQSLNDVARMTSGQLVEWLLMRYATPRGELIPNHPAGEEYAARARATYAGGYVREPKRGLVEHIAVFDFRSFGPSIIVSHNIDPSTLIVGNCEENRAPELEYCFSLEREGFIPAILKELIRRRAEIKRELKRSEGDRRRTLSFAEKALKILANSFYGYMGYPRARWYRRECAESVAAFARMYIKQVMRIAEEEFKLEVVYGDTDSLFVVIPPEKREEAQKFLQKVNESMPGIIELEFEGFYRRGLFVTKKRYALLSEDGKMVVKGLEFVRRDWAPIARETQKEVLRILLEEADPEKAARLVRDVIERIRQRRVSLEDITIYTQLTKRIKSYKSLEPHVVAAQKLKERGREVAPGMIIGYIITKGTKGISQRATPVEFARLEDYDPEYYIDNQILPAIQRIFEAIGYTRDYLKEGITQTSLSRWF

SEQ ID NO: 2388 - protein, 792 aa, unidentified
  REGION 1..792: note = Description of Unknown: Synthetic polypeptide
MPRILKGFLIDADFETVEGRALIRLFLRGEEGSFVVYDDSFSPYFYALPGDEPERVKERILASGAAEAIQKVEIEEKRLFGTPRVALRITVSHPQDVPRIRERIRRVEGVDLILEHDILFVRRYLIDRGIKPLTWLRLEVEERDGRALLRGVEQLEEEPPELRVAAVAIAVYNPKGAPRSSKDEIIMISVATSDGVEKVLTWREVQGLEQVEVLQDEKEMLLRFAELIKEGDYDVIVGYNTDSFDFPYIRDRLKKLGISLPLGRLDAELEVSRRGALPEARIRGRAHVDLYPIVRRHVKLNSYVLESVVEELLGIKKEKLDSERLFTYWDEGGEKRALLARYALEDARVTLALAEKFLPLYCELSTIVGQSLNDVARMTSGQLVEWLLMRYATPRGELIPNHPAGEEYAARARATYAGGYVREPKRGLVEHIAVFDFRSFGPSIIVSHNIDPSTLIVGNCEENRAPELEYCFSLEREGFIPAILKELIRRRAEIKRELKRSEGDRRRTLSFAEKALKILANSFYGYMGYPRARWYRRECAESVAAFARMYIKQVMRIAEEEFKLEVVYGDTDSLFVVIPPEKRELAQKFLQKVNESMPGIIELEFEGFYRRGLFVTKKRYALLSEDGKMVVKGLEFVRRDWAPIARETQKEVLRILLEEADPEKAARLVRDVIERIRQRRVSLEDITIYTQLTKRIKSYKSLEPHVVAAQKLKERGREVAPGMIIGYIITKGTKGISQRATPVEFARLEDYDPEYYIDNQILPAIQRIFEAIGYTRDYLKEGITQTSLSRWF

SEQ ID NO: 2389 - protein, 792 aa, unidentified
  REGION 1..792: note = Description of Unknown: Synthetic polypeptide
MPRILKGFLIDADFETVEGRALIRLFLRGEEGSFVVYDDSFSPYFYALPGDEPERVKERILASGAAEAIQKVEIEEKRLFGTPRVALRITVSHPLDVPRIRERIRRVEGVDLILEHDILFVRRYLIDRGIKPLTWLRLEVEERDGRALLRGVEQLEEEPPELRVAAVAIAVYNPKGAPRSSKDEIIMISVATSDGVEKVLTWREVQGLEQVEVLQDEKEMLLRFAELIKEGDYDVIVGYNTDSFDFPYIRDRLKKLGISLPLGRLDAELEVSRRGALPEARIRGRAHVDLYPIVRRHVKLNSYVLESVVEELLGIKKEKLDGERLFTYWDEGGEKRALLARYALEDARVTLALAEKFLPLYCELSTIVGQSLNDVARMTSGQLVEWLLMRYATPRGELIPNHPAGEEYAARARATYAGGYVREPKRGLVEHIAVFDFRSFGPSIIVSHNIDPSTLIVGNCEENRAPELEYCFSLEREGFIPAILKELIRRRAEIKRELKRSEGDRRRTLSFAEKALKILANSFYGYMGYPRARWYRRECAESVAAFARMYIKQVMRIAEEEFKLEVVYGDTDSLFVVIPPEKRELAQKFLQKVNESMPGIIELEFEGFYRRGLFVTKKRYALLSEDGKMVVKGLEFVRRDWAPIARETQKEVLRILLEEADPEKAARLVRDVIERIRQRRVSLEDITIYTQLTKRIKSYKSLEPHVVAAQKLKERGREVAPGMIIGYIITKGTKGISQRATPVEFARLEDYDPEYYIDNQILPAIQRIFEAIGYTRDYLKEGITQTSLSRWF

SEQ ID NO: 2390 - protein, 792 aa, unidentified
  REGION 1..792: note = Description of Unknown: Synthetic polypeptide
MPRILKGFLIDADFETVEGRALIRLFLRGEEGSFVVYDDSFSPYFYALPGDEPERVKERILASGAAEAIQKVEIEEKRLFGTPRVALRITVSHPQDVPRIRERIRRVEGVDLDLEHDILFVRRYLIDRGIKPLTWLRLEVEERDGRALLRGVEQLEEEPPELRVAAVAIAVYNPKGAPRSSKDEIIMISVATSDGVEKVLTWREVQGLEQVEVLQDEKEMLLRFAELIKEGDYDVIVGYNTDSFDFPYIRDRLKKLGISLPLGRLDAELEVSRRGALPEARIRGRAHVDLYPIVRRHVKLNSYVLESVVEELLGIKKEKLDGERLFTYWDEGGEKRALLARYALEDARVTLALAEKFLPLYCDLSTIVGQSLNDVARMTSGQLVEWLLMRYATPRGELIPNHPAGEEYAARARATYAGGYVREPKRGLVEHIAVFDFRSFGPSIIVSHNIDPSTLIVGNCEENRAPELEYCFSLEREGFIPAILKELIRRRAEIKRELKRSEGDRRRTLSFAEKALKILANSFYGYMGYPRARWYRRECAESVAAFARMYIKQVMRIAEEEFKLEVVYGDTDSLFVVIPPEKRELAQKFLQKVNESMPGIIELEFEGFYRRGLFVTKKRYALLSEDGKMVVKGLEFVRRDWAPIARETQKEVLRILLEEADPEKAARLVRDVIERIRQRRVSLEDITIYTQLTKRIKSYKSLEPHVVAAQKLKERGREVAPGMIIGYIITKGTKGISQRATPVEFARLEDYDPEYYIDNQILPAIQRIFEAIGYTRDYLKEGITQTSLSRWF

SEQ ID NO: 2391 - protein, 792 aa, unidentified
  REGION 1..792: note = Description of Unknown: Synthetic polypeptide
MPRILKGFLIDADFETVEGRALIRLFLRGEEGSFVVYDDSFSPYFYALPGDEPERVKERILASGAAEAIQKVEIEEKRLFGTPRVALRITVSHPQDVPRIRERIRRVEGVDLILEHDILFVRRYLIDRGIKPLTWLRLEVEERDGRALLRGVEQLEEEPPELRVAAVAIAVYNPKGAPRSSKDEIIMISVATSDGVEKVLTWREVQGLEQVEVLQDEKEMLLRFAELIKEGDYDVIVGYNTDSFDFPYIRDRLKKLGISLPLGRLDAELEVSRRGALPEARIRGRAHVDLYPIVRRHVKLNSYVLESVVEELLGIKKEKLDGERLFTYWDEGGEKRALLARYALEDARVTLALAEKFLPLYCELSTIVGQSLNDVARMTSGQLVEWLLMRYATPRGELIPNHPAGEEYAARARATYAGGYVREPKRGLVEHIAVFDFRSFGPSIIVSHNIDPSTLIVGNCEENRAPELEYCFQLEREGFIPAILKELIRRRAEIKRELKRSEGDRRRTLSFAEKALKILANSFYGYMGYPRARWYRRECAESVAAFARMYIKQVMRIAEEEFKLEVVYGDTDSLFVVIPPEKRELAQKFLQKVNESMPGIIELEFEGFYRRGLFVTKKRYALLSEDGKMVVKGLEFVRRDWAPIARETQKEVLRILLEEADPEKAARLVRDVIERIRQRRVSLEDITIYTQLTKRIKSYKSLEPHVVAAQKLKERGREVAPGMIIGYIITKGTKGISQRATPVEFARLEDYDPEYYIDNQILPAIQRIFEAIGYTRDYLKEGITQTSLSRWF

SEQ ID NO: 2392 - protein, 792 aa, unidentified
  REGION 1..792: note = Description of Unknown: Synthetic polypeptide
MPRILKGFLIDADFETVEGRALIRLFLRGEEGSFVVYDDSFSPYFYALPGDEPERVKERILASGAAEAIQKVEIEEKRLFGTPRVALRITVSHPQDVPRIRERIRRVEGVDLILEHDILFVRRYLIDRGIKPLTWLRLEVEERDGRALLRGVEQLEEEPPELRVAAVAIAVYNPKGAPRSSKDEIIMISVATSDGVEKVLTWREVQGLEQVEVLQDEKEMLLRFAELIKEGDYDVIVGYNTDSFDFPYIRDRLKKLGISLPLGRLDAELEVSRRGALPEARIRGRAHVDLYPIVRRHVKLNSYVLESVVEELLGIKKEKLDGERLFTYWDEGGEKRALLARYALEDARVTLALAEKFLPLYCELSTIVGQSLNDVARMTSGQLVEWLLGRYATPRGELIPNHPAGEEYAARARATYAGGYVREPKRGLVEHIAVFDFRSFGPSIIVSHNIDPSTLIVGNCEENRAPELEYCFSLEREGFIPAILKELIRRRAEIKRELKRSEGDRRRTLSFAEKALKILANSFYGYMGYPRARWYRRECAESVAAFARMYIKQVMRIAEEEFKLEVVYGDTDSLFVVIPPEKRELAQKFLQKVNESMPGIIELEFEGFYRRGLFVTKKRYALLSEDGKMVVKGLEFVRRDWAPIARETQKEVLRILLEEADPEKAARLVRDVIERIRQRRVSLEDITIYTQLTKRIKSYKSLEPHVVAAQKLKERGREVAPGMIIGYIITKGTKGISQRATPVEFARLEDYDPEYYIDNQILPAIQRIFEAIGYTRDYLKEGITQTSLSRWF

SEQ ID NO: 2393 - protein, 792 aa, unidentified
  REGION 1..792: note = Description of Unknown: Synthetic polypeptide
MPRILKGFLIDADFETVEGRALIRLFLRGEEGSFVVYDDSFSPYFYALPGDEPERVKERILASGAAEAIQKVEIEEKRLFGTPRVALRITVSHPQDVPRIRERIRRVEGVDLILEHDILFVRRYLIDRGIKPLTWLRLEVEERDGRALLRGVEQLEEEPPELRVAAVAIAVYNPKGAPRSSKDEIIMISVATSDGVEKVLTWREVQGLEQVEVLQDEKEMLLRFAELIKEGDYDVIVGYNSDSFDFPYIRDRLKKLGISLPLGRLDAELEVSRRGALPEARIRGRAHVDLYPIVRRHVKLNSYVLESVVEELLGIKKEKLDGERLFTYWDEGGEKRALLARYALEDARVTLALAEKFLPLYCELSTIVGQSLNDVARMTSGQLVEWLLMRYATPRGELIPNHPAGEEYAARARATYAGGYVREPKRGLVEHIAVFDFRSFGPSIIVSHNIDPSTLIVGNCEENRAPELEYCFSLEREGFIPAILKELIRRRAEIKRELKRSEGDRRRTLSFAEKALKILANSFYGYMGYPRARWYRRECAESVAAFARMYIKQVMRIAEEEFKLEVVYGDTDSLFVVIPPEKRELAQKFLQKVNESMPGIIELEFEGFYRRGLFVTKKRYALLSEDGKMVVKGLEFVRRDWAPIARETQKEVLRILLEEADPEKAARLVRDVIERIRQRRVSLEDITIYTQLTKRIKSYKSLEPHVVAAQKLKERGREVAPGMIIGYIITKGTKGISQRATPVEFARLEDYDPEYYIDNQILPAIQRIFEAIGYTRDYLKEGITQTSLSRWF

SEQ ID NO: 2394 - protein, 792 aa, unidentified; identical to SEQ ID NO: 2168
  REGION 1..792: note = Description of Unknown: Synthetic polypeptide

SEQ ID NO: 2395 - protein, 792 aa, unidentified
  REGION 1..792: note = Description of Unknown: Synthetic polypeptide
MPRILKGFLIDADFETVEGRALIRLFLRGEEGSFVVYDDSFSPYFYALPGDEPERVKERILASGAAEAIQKVEIEEKRLFGTPRVALRITVSHPQDVPRIRERIRRVEGVDLILEHDILFVRRYLIDRGIKPLTWLRLEVEERDGRALLRGVEQLEEEPPELRVAAVAIAVYNPKGAPRSSKDEIIMISVATSDGVEKVLTWREVQGLEQVEVLQDEKEMLLRFAELIKEGDYDVIVGYNTDSFDFPYIRDRLKKLGISLPLGRLDAELEVSRRGALPEARIRGRAHVDLYPIVRRHVKLNSYDLESVVEELLGIKKEKLDGERLFTYWDEGGEKRALLARYALEDARVTLALAEKFLPLYCELSTIVGQSLNDVARMTSGQLVEWLLMRYATPRGELIPNHPAGEEYAARARATYAGGYVREPKRGLVEHIAVFDFRSFGPSIIVSHNIDPSTLIVGNCEENRAPELEYCFSLEREGFIPAILKELIRRRAEIKRELKRSEGDRRRTLSFAEKALKILANSFYGYMGYPRARWYRRECAESVAAFARMYIKQVMRIAEEEFKLEVVYGDTDSLFVVIPPEKRELAQKFLQKVNESMPGIIELEFEGFYRRGLFVTKKRYALLSEDGKMVVKGLEFVRRDWAPIARETQKEVLRILLEEADPEKAARLVRDVIERIRQRRVSLEDITIYTQLTKRIKSYKSLEPHVVAAQKLKERGREVAPGMIIGYIITKGTKGISQRATPVEFARLRDYDPEYYIDNQILPAIQRIFEAIGYTRDYLKEGITQTSLSRWF

SEQ ID NO: 2396 - protein, 792 aa, unidentified
  REGION 1..792: note = Description of Unknown: Synthetic polypeptide
MPRILKGFLIDADFETVEGRALIRLFLRGEEGSFVVYDDSFSPYFYALPGDEPERVKERILASGAAEAIQKVEIEEKRLFGTPRVALRITVSHPQDVPRIRERIRRVEGVDLILEHDILFVRRYLIDRGIKPLTWLRLEVEERDGRALLRGVEQLEEEPPELRVAAVAIAVYNPKGAPRSSKDEIIMISVATSDGVEKVLTWREVQGLEQVEVLQDEKEMLLRFAELIKEGDYDVIVGYNTDSFDFPYIRDRLKKLGISLPLGRLDAELEVSRRGALPEARIRGRAHVDLYPIVRRHVKLNSYVLESVVEELLGIKKEKLDGERLFTYWDEGGEKRALLARYALEDARVTLALAEKFLPLYCELSTIVGQSLNDVARMTSGQLVEWLLMRYATPRGELIPNHPAGEEYAARARATYAGGYVREPKRGLVEHIAVFDFRSFGPSIIVSHNIDPSTLIVGNCEENRAPELEYCFSLEREGFIPAILKELIRRRAEIKRELKRSEGDRRRTLSFAEKALKILANSFYGYMGYPRARWYRRECAESVAAFARMYIKQVMRIAEEEFKLEVVYGDTDSLFVVIPPEKRELAQKFLQKVNESMPGIIELEFEGFYRRGLFVTKKRYALLSEDGKMVVKGLEFVRRDWAPIARETQKEVLRILLEEADPEKAARLVRDVIERIRQRRVSLEDITIYTQLTKRIKSYKSLEPHVVAAQKLKERGREVAPGMIIGYIITKGTKGISQRATPVERARLEDYDPEYYIDNQILPAIQRIFEAIGYTRDYLKEGITQTSLSRWF

SEQ ID NO: 2397 - protein, 792 aa, unidentified
  REGION 1..792: note = Description of Unknown: Synthetic polypeptide
MPRILKGFLIDADFETVEGRALIRLFLRGEEGSFVVYDDSFSPYFYALPGDEPERVKERILASGAAEAIQKVEIEEKRLFGTPRVALRITVSHPQDVPRIRERIRRVEGVDLILEHDILFVRRYLIDRGIKPLTALRLEVEERDGRALLRGVEQLEEEPPELRVAAVAIAVYNPKGAPRSSKDEIIMISVATSDGVEKVLTWREVQGLEQVEVLQDEKEMLLRFAELIKEGDYDVIVGYNTDSFDFPYIRDRLKKLGISLPLGRLDAELEVSRRGALPEARIRGRAHVDLYPIVRRHVKLNSYVLESVVEELLGIKKEKLDGERLFTYWDEGGEKRALLARYALEDARVTLALAEKFLPLYCELSTIVGQSLNDVARMTSGQLVEWLLMRYATPRGELIPNHPAGEEYAARARATYAGGYVREPKRGLVEHIAVFDFRSFGPSIIVSHNIDPSTLIVGNCEENRAPELEYCFSLEREGFIPAILKELIRRRAEIKRELKRSEGDRRRTLSFAEKALKILANSFYGYMGYPRARWYRRECAESVAAFARMYIKQVMRIAEEEFKLEVVYGDTDSLFVVIPPEKRELAQKFLQKVNESMPGIIELEFEGFYRRGLFVTKKRYALLSEDGKMVVKGLEFVRRDWAPIARETQKEVLRILLEEADPEKAARLVRDVIERIRQRRVSLEDITIYTQLTKRIKSYKSLEPHVVAAQKLKERGREVAPGMIIGYIITKGTKGISQRATPVEFARLEDYDPEYYIDNQILPAIQRIFEAIGYTRDYLKEGITQTSLSRWF

SEQ ID NO: 2398 - protein, 792 aa, unidentified
  REGION 1..792: note = Description of Unknown: Synthetic polypeptide
MPRILKGFLIDADFETVEGRALIRLFLRGEEGSFVVYDDSFSPYFYALPGDEPERVKERILASGAAEAIQKVEIEEKRLFGTPRVALRITVSHPQDVPRIRERIRRVEGVDLILEHDILFVRRYLIDRGIKPLTDLRLEVEERDGRALLRGVEQLEEEPPELRVAAVAIAVYNPKGAPRSSKDEIIMISVATSDGVEKVLTWREVQGLEQVEVLQDEKEMLLRFAELIKEGDYDVIVGYNTDSFDFPYIRDRLKKLGISLPLGRLDAELEVSRRGALPEARIRGRAHVDLYPIVRRHVKLNSYVLESVVEELLGIKKEKLDGERLFTYWDEGGEKRALLARYALEDARVTLALAEKFLPLYCELSTIVGQSLNDVARMTSGQLVEWLLMRYATPRGELIPNHPAGEEYAARARATYAGGYVREPKRGLVEHIAVFDFRSFGPSIIVSHNIDPSTLIVGNCEENRAPELEYCFSLEREGFIPAILKELIRRRAEIKRELKRSEGDRRRTLSFAEKALKILANSFYGYMGYPRARWYRRECAESVAAFARMYIKQVMRIAEEEFKLEVVYGDTDSLFVVIPPEKRELAQKFLQKVNESMPGIIELEFEGFYRRGLFVTKKRYALLSEDGKMVVKGLEFVRRDWAPIARETQKEVLRILLEEADPEKAARLVRDVIERIRQRRVSLEDITIYTQLTKRIKSYKSLEPHVVAAQKLKERGREVAPGMIIGYIITKGTKGISQRATPVEFARLEDYDPEYYIDNQILPAIQRIFEAIGYTRDYLKEGITQTSLSRWF

SEQ ID NO: 2399 - protein, 792 aa, unidentified
  REGION 1..792: note = Description of Unknown: Synthetic polypeptide
MPRILKGFLIDADFETVEGRALIRLFLRGEEGSFVVYDDSFSPYFYADPGDEPERVKERILASGAAEAIQKVEIEEKRLFGTPRVALRITVSHPQDVPRIRERIRRVEGVDLILEHDILFVRRYLIDRGIKPLTWLRLEVEERDGRALLRGVEQLEEEPPELRVAAVAIAVYNPKGAPRSSKDEIIMISVATSDGVEKVLTWREVQGLEQVEVLQDEKEMLLRFAELIKEGDYDVIVGYNTDSFDFPYIRDRLKKLGISLPLGRLDAELEVSRRGALPEARIRGRAHVDLYPIVRRHVKLNSYDLESVVEELLGIKKEKLDGERLFTYWDEGGEKRALLARYALEDARVTLALAEKFLPLYCELSTIVGQSLNDVARMTSGQLVEWLLMRYATPRGELIPNHPAGEEYAARARATYAGGYVREPKRGLVEHIAVFDFRSFGPSIIVSHNIDPSTLIVGNCEENRAPELEYCFSLEREGFIPAILKELIRRRAEIKRELKRSEGDRRRTLSFAEKALKILANSFYGYMGYPRARWYRRECAESVAAFARMYIKQVMRIAEEEFKLEVVYGDTDSLFVVIPPEKRELAQKFLQKVNESMPGIIELEFEGFYRRGLFVTKKRYALLSEDGKMVVKGLEFVRRDWAPIARETQKEVLRILLEEADPEKAARLVRDVIERIRQRRVSLEDITIYTQLTKRIKSYKSLEPHVVAAQKLKERGREVAPGMIIGYIITKGTKGISQRATPVEFARLEDYDPEYYIDNQILPAIQRIFEAIGYTRDYLKEGITQTSLSRWF

SEQ ID NO: 2400 - protein, 792 aa, unidentified
  REGION 1..792: note = Description of Unknown: Synthetic polypeptide
MPRILKGFLIDADFETVEGRALIRLFLRGEEGSFVVYDDSFSPYFYALPGDEPERVKERILASGAAEAIQKVEIEEKRLFGTPRVALRITVSHPQDVPRIRERIRRVEGVDLILEHDILFVRRYLIDRGIKPLTWLRLEVEERDGRALLRGVEQLEEEPPELRVAAVAIAVYNPKGAPRSSKDEIIMISVATSDGVEKVLTWREVQGLEQVEVLQDEKEMLLRFAELIKEGDYDVIVGYNTDSFDFPYIRDRLKKLGISLPLGRLDAELEVSRRGALPEARIHGRAHVDLYPIVRRLVKLNSYVLESVVEELLGIEKEKLDGERLFTYWDEGGEKRALLARYALEDARVTLALAEKFLPLYCELSTIVGQSLNDVARMTSGQLVEWLLMRYATPRGELIPNHPAGEEYAARARATYAGGYVREPKRGLVEHIAVFDFRSFGPSIIVSHNIDPSTLIVGNCEENRAPELEYCFSLEREGFIPAILKELIRRRAEIKRELKRSEGDRRRTLSFAEKALKILANSFYGYMGYPRARWYRRECAESVAAFARMYIKQVMRIAEEEFKLEVVYGDTDSLFVVIPPEKRELAQKFLQKVNESMPGIIELEFEGFYRRGLFVTKKRYALLSEDGKMVVKGLEFVRRDWAPIARETQKEVLRILLEEADPEKAARLVRDVIERIRQRRVSLEDITIYTQLTKRIKSYKSLEPHVVAAQKLKERGREVAPGMIIGYIITKGTKGISQRATPVEFARLEDYDPEYYIDNQILPAIQRIFEAIGYTRDYLKEGITQTSLSRWF

SEQ ID NO: 2401 - protein, 789 aa, unidentified; identical to SEQ ID NO: 2086
  REGION 1..789: note = Description of Unknown: Synthetic polypeptide

SEQ ID NO: 2402 - protein, 792 aa, unidentified
  REGION 1..792: note = Description of Unknown: Synthetic polypeptide
MPRILKGFLIDADFETVEGRALIRLFLRGEEGSFVVYDDSFSPYFYALPGDEPERVKERILASGAAEAIQKVEIEEKRLFGTPRVALRITVSHPQDVPRIRERIRRVEGVDLILEHDILFVRRYLIDRGIKPLTWLRLEVEERDGRALLRGVEQLEEEPPELRVAAVAIAVYNPKGAPRSSKDEIIMISVATSDGVEKVLTWREVQGLEQVEVLQDEKEMLLRFAELIKEGDYDVIVGYNTDSFDFPYIRDRLKKLGISLPLGRLDAELEVSRRGALPEARIRGRAHVDLYPIVRRHVKLNSYVLESVVEELLGIKKEKLDGERLFTYWDEGGEKRALLARYALEDARVTLALAEKFLPLYCELSTIVGQSLNDVARMTSGQLVEWLLMRYATPRGELIPNHPAGEEYAARARATYAGGYVREPKRGLVEHIAVFDFRSFGPSIIVSHNIDPSTLIVGNCEENRAPELEYCFSLEREGFIPAILKELIRRRAEIKRELKRSEGDRRRTLSFAEKALKILANSFYGYMGYPRARWYRRECAESVAAFARMYIKQVMRIAEEEFKLEVVYGDTDSLFVVIPPEKRELAQKFLQKVNESMPGIIELEFEGFYRRGLFVTKKRYALLSEDGKMVVKGLEFVRRDWAPIARETQKEVLRILLEEADPEKAARLVRDVIERIRQRRVSLEDITIYTQLTKRIKSYKSLEPHVVAAQRLKERGREVAPGMIIGYIITKGTKGISQRATPVEFARLEDYDPEYYIDNQILPAIQRIFEAIGYTRDYLKEGITQTSLSRWF

SEQ ID NO: 2403 - protein, 792 aa, unidentified
  REGION 1..792: note = Description of Unknown: Synthetic polypeptide
MPRILKGFLIDADFETVEGRALIRLFLRGEEGSFVVYDDSFSPYFYALPGDEPERVKERILASGAAEAIQKVEIEEKRLFGTPRVALRITVSHPQDVPRIRERIRRVEGVDLILEHDILFVRRYLIDRGIKPLTWLRLEVEERDGRALLRGVEQLEEEPPELRVAAVAWAVYNPKGAPRSSKDEIIMISVATSDGVEKVLTWREVQGLEQVEVLQDEKEMLLRFAELIKEGDYDVIVGYNTDSFDFPYIRDRLKKLGISLPLGRLDAELEVSRRGALPEARIRGRAHVDLYPIVRRHVKLNSYVLESVVEELLGIKKEKLDGERLFTYWDEGGEKRALLARYALEDARVTLALAEKFLPLYCELSTIVGQSLNDVARMTSGQLVEWLLMRYATPRGELIPNHPAGEEYAARARATYAGGYVREPKRGLVEHIAVFDFRSFGPSIIVSHNIDPSTLIVGNCEENRAPELEYCFSLEREGFIPAILKELIRRRAEIKRELKRSEGDRRRTLSFAEKALKILANSFYGYMGYPRARWYRRECAESVAAFARMYIKQVMRIAEEEFKLEVVYGDTDSLFVVIPPEKRELAQKFLQKVNESMPGIIELEFEGFYRRGLFVTKKRYALLSEDGKMVVKGLEFVRRDWAPIARETQKEVLRILLEEADPEKAARLVRDVIERIRQRRVSLEDITIYTQLTKRIKSYKSLEPHVVAAQKLKERGREVAPGMIIGYIITKGTKGISQRATPVEFARLEDYDPEYYIDNQILPAIQRIFEAIGYTRDYLKEGITQTSLSRWF

SEQ ID NO: 2404 - protein, 792 aa, unidentified
  REGION 1..792: note = Description of Unknown: Synthetic polypeptide
MPRILKGFLIDADFETVEGRALIRLFLRGEEGSFVVYDDSFSPYFYALPGDEPERVKERILASGAAEAIQKVEIEEKRLFGTPRVALRITVSHPQDVPRIRERIRRVEGVDLILEHDILFVRRYLIDRGIKPLTWLRLEVEERDGRALLRGVEQLEEEPPELRVAAVAILVYNPKGAPRSSKDEIIMISVATSDGVEKVLTWREVQGLEQVEVLQDEKEMLLRFAELIKEGDYDVIVGYNTDSFDFPYIRDRLKKLGISLPLGRLDAELEVSRRGALPEARIRGRAHVDLYPIVRRHVKLNSYVLESVVEELLGIKKEKLDGERLFTYWDEGGEKRALLARYALEDARVTLALAEKFLPLYVELSTIVGQSLNDVARMTSGQLVEWLLMRYATPRGELIPNHPAGEEYAARARATYAGGYVREPKRGLVEHIAVFDFRSFGPSIIVSHNIDPSTLIVGNCEENRAPELEYCFSLEREGFIPAILKELIRRRAEIKRELKRSEGDRRRTLSFAEKALKILANSFYGYMGYPRARWYRRECAESVAAFARMYIKQVMRIAEEEFKLEVVYGDTDSLFVVIPPEKRELAQKFLQKVNESMPGIIELEFEGFYRRGLFVTKKRYALLSEDGKMVVKGLEFVRRDWAPIARETQKEVLRILLEEADPEKAARLVRDVIERIRQRRVSLEDITIYTQLTKRIKSYKSLEPHVVAAQKLKERGREVAPGMIIGYIITKGTKGISQRATPVEFARLEDYDPEYYIDNQILPAIQRIFEAIGYTRDYLKEGITQTSLSRWF

SEQ ID NO: 2405 - protein, 791 aa, unidentified; identical to SEQ ID NO: 1802
  REGION 1..791: note = Description of Unknown: Synthetic polypeptide

SEQ ID NO: 2406 - protein, 792 aa, unidentified
  REGION 1..792: note = Description of Unknown: Synthetic polypeptide
MPRILKGFLIDADFETVEGRALIRLFLRGEEGSFVVYDDSFSPYFYALPGDEPERVKERILASGAAEAIQKVEIEEKRLFGTPRVALRITVSHPQDVPRIRERIRRVEGVDLILEHDILFVRRYLIDRGIKPLTWLRLEVEERDGRALLRGVEQLEEEPPELRVAAVAIAVYNPKGAPRSSKDEIIMISVATSDGVEKVLTWREVQGLEQVEVLQDEKEMLLRFAELIKEGDYDVIVGYNTDSFDFPYIRDRLKKLGISLPLGRLDAELEVSRRGALPEARIRGRAHVDLYPIVRRHVKLNSYVLESVVEELLGIKKEKLDGERLFTYWDEGGEKRALLARYALEDARVTLALAEKFLPLYCELSTIVGQSLNDVARMTSGQLVEWLLMRYATPRGELIPNHPAGEEYAARARATYAGGYVREPKRGLVEHIAVFDFRSFGPSIIVSHNIDPSTLIVGNCEENRAPELEYCFSLEREGFIPAILKELIRRRAEIKRELKRSEGDRRRTLSFAEKALKILAHSFYGYMGYPRARWYRRECAESVAAFARMYIKQVMRIAEEEFKLEVVYGDTDSLFVVIPPEKRELAQKFLQKVNESMPGIIELEFEGFYRRGLFVTKKRYALLSEDGKMVVKGLEFVRRDWAPIARETQKEVLRILLEEADPEKAARLVRDVIERIRQRRVSLEDITIYTQLTKRIKSYKSLEPHVVAAQKLKERGREVAPGMIIGYIITKGTKGISQRATPVEFARLEDYDPEYYIDNQILPAIQRIFEAIGYTRDYLKEGITQTSLSRWF

SEQ ID NO: 2407 - protein, 792 aa, unidentified
  REGION 1..792: note = Description of Unknown: Synthetic polypeptide
MPRILKGFLIDADFETVEGRALIRLFLRGEEGSFVVYDDSFSPYFYALPGDEPERVKERILASGAAEAIQKVEIEEKRLFGTPRVALRITVSHPQDVPRIRERIRRVEGVDLILELDILFVRRYLIDRGIKPLTWLRLEVEERDGRALLRGVEQLEEEPPELRVAAVAIAVYNPKGAPRSSKDEIIMISVATSDGVEKVLTWREVQGLEQVEVLQDEKEMLLRFAELIKEGDYDVIVGYNTDSFDFPYIRDRLKKLGISLPLGRLDAELEVSRRGALPEARIRGRAHVDLYPIVRRHVKLNSYVLESVVEELLGIKKEKLDGERLFTYWDEGGEKRALLARYALEAARVTLALAEKFLPLYCELSTIVGQSLNDVARMTSGQLVEWLLMRYATPRGELIPNHPAGEEYAARARATYAGGYVREPKRGLVEHIAVFDFRSFGPSIIVSHNIDPSTLIVGNCEENRAPELEYCFSLEREGFIPAILKELIRRRAEIKRELKRSEGDRRRTLSFAEKALKILANSFYGYMGYPRARWYRRECAESVAAFARMYIKQVMRIAEEEFKLEVVYGDTDSLFVVIPPEKRELAQKFLQKVNESMPGIIELEFEGFYRRGLFVTKKRYALLSEDGKMVVKGLEFVRRDWAPIARETQKEVLRILLEEADPEKAARLVRDVIERIRQRRVSLEDITIYTQLTKRIKSYKSLEPHVVAAQKLKERGREVAPGMIIGYIITKGTKGISQRATPVEFARLEDYDPEYYIDNQILPAIQRIFEAIGYTRDYLKEGITQTSLSRWF

SEQ ID NO: 2408 - protein, 789 aa, unidentified
  REGION 1..789: note = Description of Unknown: Synthetic polypeptide
MPRILKGFLIDADFETVEGRALIRLFLRGEEGSFVVYDDSFSPYFYALPGDEPERVKERILASGAAEAIQKVEIEEKRLFGTPRVALRITVSHPQDVPRIRERIRRVEGVDLILEHDILFVRRYLIDRGIKPLTWLRLEVEERDGRALLRGVEQLEEEPPELRVAAVAIAVYNPKGAPRSSKDEIIMISVATSDGVEKVLTWREVQGLEQVEVLQDEKEMLLRFAELIKEGDYDVIVGYNTDSFDFPYIRDRLKKLGISLPLGRLDAELEVSRRGALPEARIRGRAHVDLYPIVRRHVKLNSYVLESVVEELLGIKKEKLDGERLFTYWDEGGEKRALLARYALEDARVTLALAEKFLPLYLELSTIVGQSLNDVARMTSGQLVEWLLMRYATPRGELIPNHPAGEEYAARARATYAGGYVREPKRGLVEHIAVFDFRSFGPSIIVSHNICPSTLIVGNCEENRAPELEYCFSLEREGFIPAILKELIRRRAEIKRELKRSEGDRRRTLSFAEKALKILANSFYGYMGYPRARWYRRECAESVAAFARMYIKQVMRIAEEEFKLEVVYGDTDSLFVVIPPEKRELAQKFLQKVNESMPGIIELEFEGFYRRGLFVTKKRYALLSEDGKMVVKGLEFVRRDWAPIARETQKEVLRILLEEADPEKAARLVRDVIERIRQRRVSLEDITIYTQLTKRIKSYKSLEPHVVAAQKLKERGREVAPGMIIGYIITKGTKGISQRATPVEFARLEDYDPEYYIDNQILPAIQRIFEAIGYTRDYLKEGITQTSLS

SEQ ID NO: 2409 - protein, 792 aa, unidentified
  REGION 1..792: note = Description of Unknown: Synthetic polypeptide
MPRILKGFLIDADFETVEGRALIRLFLRGEEGSFVVYDDSFSPYFYALPGDEPERVKERILASGAAEAIQKVEIEEKRLFGTPRVALRITVSHPRDVPRIRERIRRVEGVDLILEHDILFVRRYLIDRGIKPLTWLRLEVEERDGRALLRGVEQLEEEPPELRVAAVAIAVYNPKGAPRSSKDEIIMISVATSDGVEKVLTWREVQGLEQVEVLQDEKEMLLRFAELIKEGDYDVIVGYNTDSFDFPYIRDRLKKLGISLPLGRLDAELEVSRRGALPEARIRGRAHVDLYPIVRRHVKLNSYVLESVVEELLGIKKEKLDGERLFTYWDEGGEKRALLARYALEDARVTLALAEKFLPLYCELSTIVGQSLNDVARMTSGQLVEWLLMRYATPRGELIPNHPAGEEYAARARATYAGGYVREPKRGLVEHIAVFDFRSFGPSIIVSHNIDPSTLIVGNCEENRAPELEYCFSLEREGFIPAILKELIRRRAEIKRELKRSEGDRRRTLSFAEKALKILANSFYGYMGYPRARWYRRECAESVAAFARMYIKQVMRIAEEEFKLEVVYGDTDSLFVVIPPEKRELAQKFLQKVNESMPGIIELEFEGFYRRGLFVTKKRYALLSEDGKMVVKGLEFVRRDWAPIARETQKEVLRILLEEADPEKAARLVRDVIERIRQRRVSLEDITIYTQLTKRIKSYKSLEPHVVAAQKLKERGREVAPGMIIGYIITKGTKGISQRATPVEFARLEDYDPEYYIDNQILPAIQRIFEAIGYTRDYLKEGITQTSLSRWF

SEQ ID NO: 2410 - protein, 792 aa, unidentified
  REGION 1..792: note = Description of Unknown: Synthetic polypeptide
MPRILKGFLIDADFETVEGRALIRLFLRGEEGSFVVYDDSFSPYFYALPGDEPERVKERILASGAAEAIQKVEIEEKRLFGTPRVALRITVSHPQDVPRIRERIRRVEGVDLILEHDILFVRRYLIDRGIKPLTWLRLEVEERDGRALLRGVEQLEEEPPELRVAAVAIAVYNPKGAPRSSKDEIIMISVATSDGVEKVLTWREVQGLEQVEVLQDEKEMLLRFAELIKEGDYDVIVGYNTDSFDFPYIRDRLKKLGISLPLGRLDAELEVSRRGALPEARIRGRAHVDLYPIMRRHVKLNSYVLESVVEELLGIKKEKLDGERLFTYWDEGGEKRALLARYALEDARVTLALAEKFLPLYCELSTIVGQSLNDVARMTSGQLVEWLLMRYATPRGELIPNHPAGEEYAARARATYAGGYVREPKRGLVEHIAVFDFRSFGPSIIVSHNIDPSTLIVGNCEENRAPELEYCFSLEREGFIPAILKELIRRRAEIKRELKRSEGDRRRTLSFAEKALKILANSFYGYMGYPRARWYRRECAESVAAFARMYIKQVMRIAEEEFKLEVVYGDTDSLFVVIPPEKRELAQKFLQKVNESMPGIIELEFEGFYRRGLFVTKKRYALLSEDGKMVVKGLEFVRRDWAPIARETQKEVLRILLEEADPEKAARLVRDVIERIRQRRVSLEDITIYTQLTKRIKSYKSLEPHVVAAQKLKERGREVAPGMIIGYIITKGTKGISQRATPVEFARLEDYDPEYYIDNQILPAIQRIFEAIGYTRDYLKEGITQTSLSRWF

SEQ ID NO: 2411 - protein, 792 aa, unidentified
  REGION 1..792: note = Description of Unknown: Synthetic polypeptide
MPRILKGFLIDADFETVEGRALIRLFLRGEEGSFVVYDDSFSPYFYALPGDEPERVKERILASGAAEAIQKVEIEEKRLFGTPRVALRITVSHPQDVPRIRERIRRVEGVDLILEHDILFVRRYLIDRGIKPLTWLRLEVEERDGRALLRGVEQLEEEPPELRVAAVAIAVYNPKGAPRSSKDEIIMISVATSDGVEKVLTWREVQGLEQVEVLQDEKEMLLRFAELIKEGDYDVIVGYNTDSFDFPYIRDRLKKLGISLPLGRLDAELEVSRRGALPEARIRGRAHVDLYPIVRRHVKLNSYVLESVVEELLGIKKEKLDGERLFTYWDEGGEKRALLARYALEDARVTLALAEKFLPLYCELSTIVGQSLNDVARMTSGQLVEWLLMRYATPRGELIPNHPAGEEYAARARATYAGGYVREPKRGLVEHIAVFDFRSFGPSIIVSHNIDPSTLIVGNCEENRAPELEYCFSLEREGFIPAILKELIRRRAEIKRELKRSEGDRRRTLSFAEKALKILANSFYGYMGYPRARWYRRECAESVAAFARMYIKQVMRIAEEEFKLEVVYGDTDSLFVVIPPEKRELAQKFLQKVNESMPGIIELEFEGFYRRGLFVTKKRYALLSEDGKMVVKGLEFVRRDWAPIARETQKEVLRILLEEADPEKAARLVRDVIERIRQRRVSLEDITIYTQLTKRIKSYKSLEPHVVAAQKLKERGREVAPGMIIGYIITKGTKGISQRATPVEFARLEDYDPEYYIDNQILPAIQRIFEAIGYTRDYLKEGITQTSLSRAF

SEQ ID NO: 2412 - protein, 792 aa, unidentified
  REGION 1..792: note = Description of Unknown: Synthetic polypeptide
MPRILKGFLIDADFETVEGRALIRLFLRGEEGSFVVYDDSFSPYFYALPGDEPERVKERILASGAAEAIQKVEIEEKRLFGTPRVALRITVSHPQDVPRIRERIRRVEGVDLILEHDILFVRRYLIDRGIKPLTWLRLEVEERDGRALLRGVEQLEEEPPELRVAAVAIAVYNPKGAPRSSKDEIIMISVATSDGVEKVLTWREVQGLEQVEVLQDEKEMLLRFAELIKEGDYDVIVGYNTDSFDFPYIRDRLKKLGISLPLGRLDAELEVSRRGALPEARIRGRAHVDLYPIVRRHVKLNSYVLESVVEELLGIKKEKLDGERLFTYWDEGGEKRALLARYALEDARVTLALAEKFLPLYLELSTIVGQSLNDVARATSGQLVEWLLMRYATPRGELIPNHPAGEEYAARARATYAGGYVREPKRGLVEHIAVFDFRSFGPSIIVSHNIDPSTLIVGNCEENRAPELEYCFSLEREGFIPAILKELIRRRAEIKRELKRSEGDRRRTLSFAEKALKILANSFYGYMGYPRARWYRRECAESVAAFARMYIKQVMRIAEEEFKLEVVYGDTDSLFVVIPPEKRELAQKFLQKVNESMPGIIELEFEGFYRRGLFVTKKRYALLSEDGKMVVKGLEFVRRDWAPIARETQKEVLRILLEEADPEKAARLVRDVIERIRQRRVSLEDITIYTQLTKRIKSYKSLEPHVVAAQKLKERGREVAPGMIIGYIITKGTKGISQRATPVEFARLEDYDPEYYIDNQILPAIQRIFEAIGYTRDYLKEGITQTSLSRWF

SEQ ID NO: 2413 - protein, 792 aa, unidentified
  REGION 1..792: note = Description of Unknown: Synthetic polypeptide
MPRILKGFLIDADFETVEGRALIRLFLRGEEGSFVVYDDSFSPYFYALPGDEPERVKERILASGAAEAIQKVEIEEKRLFGTPRVALRITVSHPQDVPRIRERIRRVEGVDLILEHDILFVRRYLIDRGIKPLTWLRLEVEERDGRALLRGVEQLEEEPPELRVAAVAIAVYNPKGAPRSSKDEIIMISVATSDGVEKVLTWREVQGLEQVEVLQDEKEMLLRFAELIKEGDYDVIVGYNTDSFDFPYIRDRLKKLGISLPLGRLDAELEVSRRGALPEARIRGRAHVDLYPIVRRHVKLNSYVLESVVEELLGIKKEKLDGERLFTYWDEGGEKRALLARYALEDARVTLALAEKFLPLYCELSTIVGQSLNDVARMTSGQLVEWLLMRYATPRGELIPNHPAGEEYAARARATYAGGYVREPKRGLVEHIAVFDFRSFGPSIIVSHNIDPSTLIVGNCEENRAPELEYCFSLEREGFIPAILKELIRRRAEIKRELKRSEGDRRRTLSFAEKALKILANSFYGYMGYPRARWYRRECAESVAAFARMYIKQVMRIAEEEFKLEVVYGDTDSLFVVIPPEKRESAQKFLQKVNESMPGIIELEFEGFYRRGLFVTKKRYALLSEDGKMVVKGLEFVRRDWAPIARETQKEVLRILLEEADPEKAARLVRDVIERIRQRRVSLEDITIYTQLTKRIKSYKSLEPHVVAAQKLKERGREVAPGMIIGYIITKGTKGISQRATPVEFARLEDYDPEYYIDNQILPAIQRIFEAIGYTRDYLKEGITQTSLSRWF

SEQ ID NO: 2414 - protein, 792 aa, unidentified; identical to SEQ ID NO: 2291
  REGION 1..792: note = Description of Unknown: Synthetic polypeptide

SEQ ID NO: 2415 - protein, 789 aa, unidentified
  REGION 1..789: note = Description of Unknown: Synthetic polypeptide
MPRILKGFLIDADFETVEGRALIRLFLRGEEGSFVVYDDSFSPYFYALPGDEPERVKERILASGAAEAIQKVEIEEKRLFGTPRVALRITVSHPQDVPRIRERIRRVEGVDLILEHDILFVRRYLIDRGIKPLTWLRLEVEERDGRALLRGVEQLEEEPPELRVAAVAIAVYNPKGAPRSSKDEIIMISVATSDGVEKVLTWREVQGLEQVEVLQDEKEMLLRFAELIKEGDYDVIVGYNTDSFDFPYIRDRLKKLGISLPLGRLDAELEVSRRGALPEARIRGRAHVDLYPIVRRHVKLNSYVLESVVEELLGIKKEKLDGERLFTYWDEGGEKRALLARYALEDARVTLALAEKFLPLYLELSTIVGQSLNDVARMTSGQLVEWLLMRYATPRGELIPNHPAGEEYAARARATYAGGYVREPKRGLVEHIAVFDFRSFGPSIIVSHNIDPSRLIVGNCEENRAPELEYCFSLEREGFIPAILKELIRRRAEIKRELKRSEGDRRRTLSFAEKALKILANSFYGYMGYPRARWYRRECAESVAAFARMYIKQVMRIAEEEFKLEVVYGDTDSLFVVIPPEKRELAQKFLQKVNESMPGIIELEFEGFYRRGLFVTKKRYALLSEDGKMVVKGLEFVRRDWAPIARETQKEVLRILLEEADPEKAARLVRDVIERIRQRRVSLEDITIYTQLTKRIKSYKSLEPHVVAAQKLKERGREVAPGMIIGYIITKGTKGISQRATPVEFARLEDYDPEYYIDNQILPAIQRIFEAIGYTRDYLKEGITQTSLS

SEQ ID NO: 2416 - protein, 789 aa, unidentified
  REGION 1..789: note = Description of Unknown: Synthetic polypeptide
MPRILKGFLIDADFETVEGRALIRLFLRGEEGSFVVYDDSFSPYFYALPGDEPERVKERILASGAAEAIQKVEIEEKRLFGTPRVALRITVSHPQDVPRIRERIRRVEGVDLILEHDILFVRRYLIDRGIKPLTWLRLEVEERDGRALLRGVEQLEEEPPELRVAAVAIAVYNPKGAPRSSKDEIIMISVATSDGVEKVLTWREVQGLEQVEVLQDEKEMLLRFAELIKEGDYDVIVGYNTDSFDFPYIRDRLKKLGISLPLGRLDAELEVSRRGALPEARIRGRAHVDLYPIVRRHVKLNSYDLESVVEELLGIKKEKLDGERLFTYWDEGGEKRALLARYALEDARVTLALAEKFLPLYLELSTIVGQSLNDVARMTSGQLVEWLLMRYATPRGELIPNHPAGEEYAARARATYAGGYVREPKRGLVEHIAVFDFRSFGPSIIVSHNIDPSTLIVGNCEENRAPELEYCFSLEREGFIPAILKELIRRRAEIKRELKRSEGDRRRTLSFAEKALKILANSFYGYMGYPRARWYRSECAESVAAFARMYIKQVMRIAEEEFKLEVVYGDTDSLFVVIPPEKRELAQKFLQKVNESMPGIIELEFEGFYRRGLFVTKKRYALLSEDGKMVVKGLEFVRRDWAPIARETQKEVLRILLEEADPEKAARLVRDVIERIRQRRVSLEDITIYTQLTKRIKSYKSLEPHVVAAQKLKERGREVAPGMIIGYIITKGTKGISQRATPVEFARLEDYDPEYYIDNQILPAIQRIFEAIGYTRDYLKEGITQTSLS

SEQ ID NO: 2417 - protein, 792 aa, unidentified
  REGION 1..792: note = Description of Unknown: Synthetic polypeptide
MPRILKGFLIDADFETVEGRALIRLFLRGEEGSFVVYDDSFSPYFYALPGDEPERVKERILASGAAEAIQKVEIEEKRLFGTPRVALRITVSHPQDVPRIRERIRRVEGVDLILEHDILFVRRYLIDRGIKPLTWLRLEVEERDGRALLRGVEQLEEEPPELRVAAVAIAVYNPKGAPRSSKDEIIVISVATSDGVEKVLTWREVQGLEQVEVLQDEKEMLLRFAELIKEGDYDVIVGYNTDSFDFPYIRDRLKKLGISLPLGRLDAELEVSRRGALPEARIRGRAHVDLYPIVRRHVKLNSYVLESVVEELLGIKKEKLDGERLFTYWDEGGEKRALLARYALEDARVTLALAEKFLPLYCELSTIVGQSLNDVARMTSGQLVEWLLMRYATPRGELIPNHPAGEEYAARARATYAGGYVREPKRGLVEHIAVFDFRSFGPSIIVSHNIDPSTLIVGNCEENRAPELEYCFSLEREGFIPAILKELIRRRAEIKRELKRSEGDRRRTLSFAEKALKILANSFYGYMGYPRARWYRRECAESVAAFARMYIKQVMRIAEEEFKLEVVYGDTDSLFVVIPPEKRELAQKFLQKVNESMPGIIELEFEGFYRRGLFVTKKRYALLSEDGKMVVKGLEFVRRDWAPIARETQKEVLRILLEEADPEKAARLVRDVIERIRQRRVSLEDITIYTQLTKRIKSYKSLEPHVVAAQKLKERGREVAPGMIIGYIITKGTKGISQRATPVEFARLEDYDPEYYIDNQILPAIQRIFEAIGYTRDYLKEGITQTSLSRWF

SEQ ID NO: 2418 - protein, 792 aa, unidentified
  REGION 1..792: note = Description of Unknown: Synthetic polypeptide
MPRILKGFLIDADFETVEGRALIRLFLRGEEGSFVVYDDSFSPYFYALPGDEPERVKERILASGAAEAIQKVEIEEKRLFGTPRVALRITVSHPQDVPRIRERIRRVEGVDLILEHDILFVRRYLIDRGIKPLTWLRLEVEERDGRALLRGVEQLEEEPPELRVAAVAIAVYNPKGAPRSSKDEIIMISVATSDGVEKVLTWREVQGLEQVEVLQDEKEMLLRFAELIKDGDYDVIVGYNTDSFDFPYIRDRLKKLGISLPLGRLDAELEVSRRGALPEAHIRGRAHVDLYPIVRRHVKLNSYVLESVVEELLGIKKEKLDGERLFTYWDEGGEKRALHARYALEDARVTLALAEKLLPLYCELSTIVGQSLNDVARMTSGQLVEWLLMRYATPRGELIPNHPAGEEYAARARATYAGGYVREPKRGLVEHIAVFDFRSFGPSIIVSHNIDPSTLIVGNCEENRAPELEYCFSLEREGFIPAILKELIRRRAEIKRELKRSEGDRRRTLSFAEKALKILANSFYGYMGYPRARWYRRECAESVAAFARMYIKQVMRIAEEEFKLEVVYGDTDSLFVVIPPEKRELAQKFLQKVNESMPGIIELEFEGFYRRGLFVTKKRYALLSEDGKMVVKGLEFVRRDWAPIARETQKEVLRILLEEADPEKAARLVRDVIERIRQRRVSLEDITIYTQLTKRIKSYKSLEPHVVAAQKLKERGREVAPGMIIGYIITKGTKGISQRATPVEFARLEDYDPEYYIDNQILPAIQRIFEAIGYTRDYLKEGITQTSLSRWF

SEQ ID NO: 2419 - protein, 790 aa, unidentified
  REGION 1..790: note = Description of Unknown: Synthetic polypeptide
MPRILKGFLIDADFETVEGRALIRLFLRGEEGSFVVYDDSFSPYFYALPGDEPERVKERILASGAAEAIQKVEIEEKRLFGTPRVALRITVSHPQDVPRIRERIRRVEGVDLILEHDILFVRRYLIDRGIKPLTWLRLEVEERDGRALLRGVEQLEEEPPELRVAAVAIAVYNPKGAPRSSKDEIIMISVATSDGVEKVLTWREVQGLEQVEVLQDEKEMLLRFAELIKEGDYDVIVGYNTDSFDFPYIRDRLKKLGISLPLGRLDAELEVSRRGALPEARIRGRAHVDLYPIVRRHVKLNSYVLESVVEELLGIKKEKLDGERLFTYWDEGGEKRALLARYALEDARVTLALAEKFLPLYLELSTIVGQSLNDVARMTSGQLVEWLLMRYATPRGELIPNHPAGEEYAARARATYAGGYVREPKRGLVEHIAVFDFRSFGPSIIVSHNIDPSTLIVGNCEENRAPELEYCFSLEREGFIPAILKELIRRRAEIKRELKRSEGDRRRTLSFAEKALKILANSFYGYMGYPRARWYRRECAESVAAFARMYIKQVMRIAEEEFKLEVVYGDTDSLFVVIPPEKRELAQKFLQKVNESMPGIIELEFEGFYRRGLFVTKKRYALLSEDGKMVVKGLEFVRRDWAPIARETQKEVLRILLEEADPEKAARLVRDVIERIRQRRVSLEDITIYTQLTKRIKSYKSLEPHVVAAQKLKERGREVAPGMIIGYIITKGTKGISQRATPVEFARLEDYDPEYYIDNQILPAIQRIFEAIGYTRDYLKEGITQTSLSR

SEQ ID NO: 2420 - protein, 790 aa, unidentified
  REGION 1..790: note = Description of Unknown: Synthetic polypeptide
MPRILKGFLIDADFETVEGRALIRLFLRGEEGSFVVYDDSFSPYFYALPGDEPERVKERILASGAAEAIQKVEIEEKRLFGTPRVALRITVSHPQDVPRIRERIRRVEGVDLILEHDILFVRRYLIDRGIKPLTWLRLEVEERDGRALLRGVEQLEEEPPELRVAAVAIAVYNPKGAPRSSKDEIIMISVATSDGVEKVLTWREVQGLEQVEVLQDEKEMLLRFAELIKEGDYDVIVGYNTDSFDFPYIRDRLKKLGISLPLGRLDAELEVSRRGALPEARIRGRAHVDLYPIVRRHVKLNSYVLESVVEELLGIKKEKLDGERLFTYWDEGGEKRALLARYALEDARVTLQLAEKFLPLYLELSTIVGQSLNDVARMTSGQLVEWLLMRYATPRGELIPNHPAGEEYAARARATYAGGYVREPKRGLVEHIAVFDFRSFGPSIIVSHNIDPSTLIVGNCEENRAPELEYCFSLEREGFIPAILKELIRRRAEIKRELKRSEGDRRRTLSFAEKALKILANSFYGYMGYPRARWYRRECAESVAAFARMYIKQVMRIAEEEFKLEVVYGDTDSLFVVIPPEKRELAQKFLQKVNESMPGIIELEFEGFYRRGLFVTKKRYALLSEDGKMVVKGLEFVRRDWAPIARETQKEVLRILLEEADPEKAARLVRDVIERIRQRRVSLEDITIYTQLTKRIKSYKSLEPHVVAAQKLKERGREVAPGMIIGYIITKGTKGISQRATPVEFARLEDYDPEYYIDNQILPAIQRIFEAIGYTRDYLKEGITQTSLSR

SEQ ID NO: 2421 - protein, 792 aa, unidentified
  REGION 1..792: note = Description of Unknown: Synthetic polypeptide
MPRILKGFLIDADFETVEGRALIRLFLRGEEGSFVVYDDSFSPYFYALPGDEPERVKERILASGAAEAIQKVEIEEKRLFGTPRVALRITVSHPQDVPRIRERIRRVEGVDLILEHDILFVRRYLIDRGIKPLTWLRLEVEERDGRALLRGVEQLEEEPPELRVAAVAIAVYNPKGAPRSSKDEIIMISVATSDGVEKVLTWREVQGLEQVEVLQDEKEMLLRFAELIKEGDYDVIVGYNTDSFDFPYIRDRLKKLGISLPLGRLDAELEVSRRGALPEARIRGRAHVDLYPIVRRHVKLNSYVLESVVEELLGIKKEKLDGERLFTYWDEGGEKRALLARRALEDARVTLALAEKFLPLYCELSTIVGQSLNDVARMTSGQLVEWLLMRYATPRGELIPNHPAGEEYAARARATYAGGYVREPKRGLVEHIAVFDFRSFGPSIIVSHNIDPSTLIVGNCEENRAPELEYCFSLEREGFIPAILKELIRRRAEIKRELKRSEGDRRRTLSFAEKALKILANSFYGYMGYPRARWYRRECAESVAAFARMYIKQVMRIAEEEFKLEVVYGDTDSLFVVIPPEKRELAQKFLQKVNESMPGIIELEFEGFYRRGLFVTKKRYALLSEDGKMVVKGLEFVRRDWAPIARETQKEVLRILLEEADPEKAARLVRDVIERIRQRRVSLEDITIYTQLTKRIKSYKSLEPHVVAAQKLKERGREVAPGMIIGYIITKGTKGISQRATPVEFARLEDYDPEYYIDNQILPAIQRIFEAIGYTRDYLKEGITQTSLSRWF

SEQ ID NO: 2422 - protein, 792 aa, unidentified
  REGION 1..792: note = Description of Unknown: Synthetic polypeptide
MPRILKGFLIDADFETVEGRALIRLFLRGEEGSFVVYDDSFSPYFYALPGDEPERVKERILASGAAEAIQKVEIEEKRLFGTPRVALRITVSHPQDVPRIRERIRRVEGVDLINEHDILFVRRYLIDRGIKPLTWLRLEVEERDGRALLRGVEQLEEEPPELRVAAVAIAVYNPKGAPRSSKDEIIMISVATSDGVEKVLTWREVQGLEQVEVLQDEKEMLLRFAELIKEGDYDVIVGYNTDSFDFPYIRDRLKKLGISLPLGRLDAELEVSRRGALPEARIRGRAHVDLYPIVRRHVKLNSYVLESVVEELLGIKKEKLDGERLFTYWDEGGEKRALLARYALEDARVTLALAEKFLPLYCELSTIVGQSLNDVARMTSGQLVEWLLMRYATPRGELIPNHPAGEEYAARARATYAGGYVREPKRGLVEHIAVFDFRSFGPSIIVSHNIDPSTLIVGNCEENRAPELEYCFSLEREGFIPAILKELIRRRAEIKRELKRSEGDRRRTLSFAEKALKILANSFYGYMGYPRARWYRRECAESVAAFARMYIKQVMRIAEEEFKLEVVYGDTDSLFVVIPPEKRELAQKFLQKVNESMPGIIELEFEGFYRRGLFVTKKRYALLSEDGKMVVKGLEFVRRDWAPIARETQKEVLRILLEEADPEKAARLVRDVIERIRQRRVSLEDITIYTQLTKRIKSYKSLEPHVVAAQKLKERGREVAPGMIIGYIITKGTKGISQRATPVEFARLEDYDPEYYIDNQILPAIQRIFEAIGYTRDYLKEGITQTSLSRWF

SEQ ID NO: 2423 - protein, 789 aa, unidentified
  REGION 1..789: note = Description of Unknown: Synthetic polypeptide
MPRILKGFLIDADFETVEGRALIRLFLRGEEGSFVVYDDSFSPYFYALPGDEPERVKERILASGAAEAIQKVEIEEKRLFGTPRVALRITVSHPQDVPRIRERIRRVEGVDLILELDILFVRRYLIDRGIKPLTWLRLEVEERDGRALLRGVEQLEEEPPELRVAAVAIAVYNPKGAPRSSKDEIIMISVATSDGVEKVLTWREVQGLEQVEVLQDEKEMLLRFAELIKEGDYDVIVGYNTDSFDFPYIRDRLKKLGISLPLGRLDAELEVSRRGALPEARIRGRAHVDLYPIVRRHVKLNSYVLESVVEELLGIKKEKLDGERLFTYWDEGGEKRALLARYALEDARVTLALAEKFLPLYLELSTIVGQSLNDVARMTSGQLVEWLLMRYATPRGELIPNHPAGEEYAARARATYAGGYVREPKRGLVEHIAVFDFRSFGPSIIVSHNIDPSTLIVGNCEENRAPELEYCFSLEREGFIPAILKELIRRRAEIKRELKRSEGDRRRTLSFAEKALKILANSFYGYMGYPRARWYRRECAESVAAFARMYIKQVMRIAEEEFKLEVVYGDTDSLFVVIPPEKRELAQKFLQKVNESMPGIIELEFEGFYRRGLFVTKKRYALLSEDGKMVVKGLEFVRRDWAPIARETQKEVLRILLEEADPEKAARLVRDVIERIRQRRVSLEDITIYTQLTKRIKSYKSLEPHVVAAQKLKERGREVAPGMIIGYIITKGTKGISQRATPVEFARLEDYDPEYYIDNQILPAIQRIFEAIGYTRDYLKEGITQTSLS

SEQ ID NO: 2424 - protein, 789 aa, unidentified; identical to SEQ ID NO: 2287
  REGION 1..789: note = Description of Unknown: Synthetic polypeptide

SEQ ID NO: 2425 - protein, 792 aa, unidentified
  REGION 1..792: note = Description of Unknown: Synthetic polypeptide
MPRILKGFLIDADFETVEGRALIRLFLRGEEGSFVVYDDSFSPYFYALPGDEPERVKERILASGAAEAIQKVEIEEKRLFGTPRVALRITVSHPQDVPRIRERIRRVEGVDLILEHDILFVRRYLIDRGIKPLTWLRLEVEERDGRALLRGVEQLEEEPPELRVAAVAIAVYNPQGAPRSSKDEIIMISVATSDGVEKVLTWREVQGLEQVEVLQDEKEMLLRFAELIKEGDYDVIVGYNTDSFDFPYIRDRLKKLGISLPLGRLDAELEVSRRGALPEARIRGRAHVDLYPIVRRHVKLNSYDLESVVEELLGIKKEKLDGERLFTYWDEGGEKRALLARYALEDARVTLALAEKFLPLYCELSTIVGQSLNDVARMTSGQLVEWLLMRYATPRGELIPNHPAGEEYAARARATYAGGYVREPKRGLVEHIAVFDFRSFGPSIIVSHNIDPSTLIVGNCEENRAPELEYCFSLEREGFIPAILKELIRRRAEIKRELKRSEGDRRRTLSFAEKALKILANSFYGYMGYPRARWYRRECAESVAAFARMYIKQVMRIAEEEFKLEVVYGDTDSLFVVIPPEKRELAQKFLQKVNESMPGIIELEFEGFYRRGLFVTKKRYALLSEDGKMVVKGLEFVRRDWAPIARETQKEVLRILLEEADPEKAARLVRDVIERIRQRRVSLEDITIYTQLTKRIKSYKSLEPHVVAAQKLKERGREVAPGMIIGYIITKGTKGISQRATPVEFARLEDYDPEYYIDNQILPAIQRIFEAIGYTRDYLKEGITQTSLSRWF

SEQ ID NO: 2426 - protein, 792 aa, unidentified
  REGION 1..792: note = Description of Unknown: Synthetic polypeptide
MPRILKGFLIDADFETVEGRALIRLFLRGEEGSFVVYDDSFSPYFYALPGDEPERVKERILASGAAEAIQKVEIEEKRLFGTPRVALRITVSHPQDVPRIRERIRRVEGVDLILEHDILFVRRYLIDRGIKPLTWLRLEVEERDGRALLRGVEQLEEEPPELRVAAVAIAVYNPKGAPRSSKDEIIMISVATSDGVEKVLTWREVQGLEQVEVLQDEKEMLLRFAELIKEGDYDVIVGYNTDSFDFPYIRDRLKKLGISLPLGRLDAELEVSRRGALPEARIRGRAHVDLYPIVRRHVKLNSYDLESVVEELLGIKKEKLDGERLFTYWDEGGEKRALLARYALEDARVTLALAEKFLPLYCELSTIVGQSLNDVARMTSGQLVEWLLMRYATPRGELIPNHPAGEEYAARARATYAGGYVREPKRGLVEHIAVFDFRSFGPSIIVSHNIDPSTLIVGNCEENRAPELEYCFSLEREGFIPAILKELIRRRAEIKRELKRSEGDRRRTLSFAEKALKILANSFYGYMGYPRARWYRRECAESVAAFARMYIKQVMRIAEEEFKLEVVYGDTDSLFVVIPPEKRELAQKFLQKVNESMPGIIELEFEGFYRRGLFVTKKRYALLSEDGKVVVKGLEFVRRDWAPIARETQKEVLRILLEEADPEKAARLVRDVIERIRQRRVSLEDITIYTQLTKRIKSYKSLEPHVVAAQKLKERGREVAPGMIIGYIITKGTKGISQRATPVEFARLEDYDPEYYIDNQILPAIQRIFEAIGYTRDYLKEGITQTSLSRWF

SEQ ID NO: 2427 - protein, 792 aa, unidentified
  REGION 1..792: note = Description of Unknown: Synthetic polypeptide
MPRILKGFLIDADFETVEGRALIRLFLRGEEGSFVVYDDSFSPYFYALPGDEPERVKERILASGAAEAIQKVEIEEKRLFGTPRVALRITVSHPQDVPRIRERIRRVEGVDLILEHDILFVRRYLIDRGIKPLTWLRLEVEERDGRALLRGVEQLEEEPPELRVAAVAIAVYNPKGAPRSSKDEIIMISVATSDGVEKVLTWREVQGLEQVEVLQDEKEMLLRFAELIKEGDYDVIVGYNTDSFDFPYIRDRLKKLGISLPLGRLDAELEVSRRGALPEARIRGRAHVDLYPIVRRHVKLNSYVLESVVEELLGIKKEKLDGERLFTYWDEGGEKRALLARYALEDARVTLALAEKFLPLYCELSTIVGQSLNDVARMTSGQLVEWLLMRYATPRGELIPNHPAGEEYAARARATYAGGYVREPKRGLVEHIAVFDFRSFGPSIIVSHNIDPSTLIVGNCEENRAPELEYCFSLEREGFIPAILKELIRRRAEIKRELKRSEGDRRRTLSFAEKALKILANSFYGYMGYTRARWYRRECAESVAAFARMYIKQVMRIAEEEFKLEVVYGDTDSLFVVIPPEKRELAQKFLQKVNESMPGIIELEFEGFYRRGLFVTKKRYALLSEDGKMVVKGLEFVRRDWAPIARETQKEVLRILLEEADPEKAARLVRDVIERIRQRRVSLEDITIYTQLTKRIKSYKSLEPHVVAAQKLKERGREVAPGMIIGYIITKGTKGISQRATPVEFARLEDYDPEYYIDNQILPAIQRIFEAIGYTRDYLKEGITQTSLSRWF

SEQ ID NO: 2428 - protein, 792 aa, unidentified
  REGION 1..792: note = Description of Unknown: Synthetic polypeptide
MPRILKGFLIDADFETVEGRALIRLFLRGEEGSFVVYDDSFSPYFYALPGDEPERVKERILASGAAEAIQKVEIEEKRLFGTPRVALRITVSHPQDVPRIRERIRRVEGVDLILEHDILFVRRYLIDRGIKPLTWLRLEVEERDGRALLRGVEQLEEEPPELRVAAVAIAVYNPKGAPRSSKDEIIMISVATSDGVEKVLTWREVQGLEQVEVLQDEKEMLLRFAELIKEGDYDVIVGYNTDSFDFPYIRDRLKKLGISLPLGRLDAELEVSRRGALPEARIRGRAHVDLYPIVRRHVKLNSYVLESVVEELLGIKKEKLDGERLFTYWDEGGEKRALLARYALEDARVTLALAEKFLPLYCELSTIVGQSLNDVARMTSGQLVEWLLVRYATPRGELIPNHPAGEEYAARARATYAGGYVREPKRGLVEHIAVFDFRSFGPSIIVSHNIDPSTLIVGNCEENRAPELEYCFSLEREGFIPAILKELIRRRAEIKRELKRSEGDRRRTLSFAEKALKILANSFYGYMGYPRARWYRRECAESVAAFARMYIKQVMRIAEEEFKLEVVYGDTDSLFVVIPPEKRELAQKFLQKVNESMPGIIELEFEGFYRRGLFVTKKRYALLSEDGKMVVKGLEFVRRDWAPIARETQKEVLRILLEEADPEKAARLVRDVIERIRQRRVSLEDITIYTQLTKRIKSYKSLEPHVVAAQKLKERGREVAPGMIIGYIITKGTKGISQRATPVEFARLEDYDPEYYIDNQILPAIQRIFEAIGYTRDYLKEGITQTSLSRWF

SEQ ID NO: 2429 - protein, 792 aa, unidentified
  REGION 1..792: note = Description of Unknown: Synthetic polypeptide
MPRILKGFLIDADFETVEGRALIRLFLRGEEGSFVVYDDSFSPYFYALPGDEPERVKERILASGAAEAIQKVEIEEKRLFGTPRVALRITVSHPQDVPRIRERIRRVEGVDLILEHDILFVRRYLIDRGIKPLTWLRLEVEERDGRALLRGVEQLEEEPPELRVAAVAIAVYNPKGAPRSSKDEIIMISVATSDGVEKVLTWREVQGLEQVEVLQDEKEMLLRFAELIKEGDYDVIVGYNTDSFDFPYIRDRLKKLGISLPLGRLDAELEVSRRGALPEARIRGRAHVDLYPIVRRHVKLNSYVLESVVEELLGIKKEKLDGERLFTYWDEGGEKRALLARYALEDARVTLALAEKFLPLYCELSTIVGQSLNDVARMTSGQLVEWLLMRYATPRGELIPNHPAGEEYAARARATYAGGYVREPKRGLVEHIAVFDFRSFGPSIIVSHNIDPSTLIVGNCEENRAPELEYCFSLEREGFIPAILKELIRRRAEIKRELKRSEGDRRRTLSFAEKALKILANSFYGYMGYPRARWYRRECAESVAAFARMYIKQVMRIAEEEFKLEVVYGDTDSLFVVIPPEKRERAQKFLQKVNESMPGIIELEFEGFYRRGLFVTKKRYALLSEDGKMVVKGLEFVRRDWAPIARETQKEVLRILLEEADPEKAARLVRDVIERIRQRRVSLEDITIYTQLTKRIKSYKSLEPHVVAAQKLKERGREVAPGMIIGYIITKGTKGISQRATPVEFARLEDYDPEYYIDNQILPAIQRIFEAIGYTRDYLKEGITQTSLSRWF

SEQ ID NO: 2430 - protein, 792 aa, unidentified; identical to SEQ ID NO: 2104
  REGION 1..792: note = Description of Unknown: Synthetic polypeptide

SEQ ID NO: 2431 - protein, 792 aa, unidentified; identical to SEQ ID NO: 1986
  REGION 1..792: note = Description of Unknown: Synthetic polypeptide

SEQ ID NO: 2432 - protein, 792 aa, unidentified; identical to SEQ ID NO: 1981
  REGION 1..792: note = Description of Unknown: Synthetic polypeptide

SEQ ID NO: 2433 - protein, 792 aa, unidentified
  REGION 1..792: note = Description of Unknown: Synthetic polypeptide
MPRILKGFLIDADFETVEGRALIRLFLRGEEGSFVVYDDSFSPYFYALPGDEPERVKERILASGAAEAIQKVEIEEKRLFGTPRVALRITVSHPQDVPRIRERIRRVEGVDLILEHDILFVRRYLIDRGIKPLTWLRLEVEERDGRALLRGVEQLEEEPPELRVAAVAIAVYNPKGAPRSSKDEIIMISVATSDGVEKVLTWREVQGLEQVEVLQDEKEMLLRFAELIKEGDYDVIVGYNTDSFDFPYIRDRLKKLGISLPLGRLDAELEVSRRGALPEARIRGRAHVDLYPIVRRHVKLNSYDLESVVEELLGIKKEKLDGERLFTYWDEGGEKRALLARYALEDARVTLALAEKFLPLYCELSTIVGQSLNDVARMTSGQLVEWLLMRYATPRGELIPNHPAGEEYAARARATYAGGYVREPKRGLVEHIAVFDFRSFGPSIIVSHNIDPSTLIVGNCEENRAPELEYCFKLEREGFIPAILKELIRRRAEIKRELKRSEGDRRRTLSFAEKALKILANSFYGYMGYPRARWYRRECAESVAAFARMYIKQVMRIAEEEFKLEVVYGDTDSLFVVIPPEKRELAQKFLQKVNESMPGIIELEFEGFYRRGLFVTKKRYALLSEDGKMVVKGLEFVRRDWAPIARETQKEVLRILLEEADPEKAARLVRDVIERIRQRRVSLEDITIYTQLTKRIKSYKSLEPHVVAAQKLKERGREVAPGMIIGYIITKGTKGISQRATPVEFARLEDYDPEYYIDNQILPAIQRIFEAIGYTRDYLKEGITQTSLSRWF

SEQ ID NO: 2434 - protein, 792 aa, unidentified; identical to SEQ ID NO: 2130
  REGION 1..792: note = Description of Unknown: Synthetic polypeptide

SEQ ID NO: 2435 - protein, 792 aa, unidentified
  REGION 1..792: note = Description of Unknown: Synthetic polypeptide
MPRILKGFLIDADFETVEGRALIRLFLRGEEGSFVVYDDSFSPYFYALPGDEPERVKERILASGAAEAIQKVEIEEKRLFGTPRVALRITVSHPQDVPRIRERIRRVEGVDLILEHDILFVRRYLIDRGIKPLTWLRLEVEERDGRALLRGVEQLEEEPPELRVAAVKIAVYNPKGAPRSSKDEIIMISVATSDGVEKVLTWREVQGLEQVEVLQDEKEMLLRFAELIKEGDYDVIVGYNTDSFDFPYIRDRLKKLGISLPLGRLDAELEVSRRGALPEARIRGRAHVDLYPIVRRHVKLNSYVLESVVEELLGIKKEKLDGERLFTYWDEGGEKRALLARYALEDARVTLALAEKFLPLYCELSTIVGQSLNDVARMTSGQLVEWLLMRYATPRGELIPNHPAGEEYAARARATYAGGYVREPKRGLVEHIAVFDFRSFGPSIIVSHNIDPSTLIVGNCEENRAPELEYCFSLEREGFIPAILKELIRRRAEIKRELKRSEGDRRRTLSFAEKALKILANSFYGYMGYPRARWYRRECAESVAAFARMYIKQVMRIAEEEFKLEVVYGDTDSLFVVIPPEKRELAQKFLQKVNESMPGIIELEFEGFYRRGLFVTKKRYALLSEDGKMVVKGLEFVRRDWAPIARETQKEVLRILLEEADPEKAARLVRDVIERIRQRRVSLEDITIYTQLTKRIKSYKSLEPHVVAAQKLKERGREVAPGMIIGYIITKGTKGISQRATPVEFARLEDYDPEYYIDNQILPAIQRIFEAIGYTRDYLKEGITQTSLSRWF

SEQ ID NO: 2436 - protein, 792 aa, unidentified
  REGION 1..792: note = Description of Unknown: Synthetic polypeptide
MPRILKGFLIDADFETVEGRALIRLFLRGEEGSFVVYDDSFSPYFYALPGDEPERVKERILASGAAEAIQKVEIEEKRLFGTPRVALRITVSHPQDVPRIRERIRRVEGVDLILEHDILFVRRYLIDRGIKPLTWLRLEVEERDGRALLRGVEQLEEEPPELRVAAVAIAVYNPKGAPRSSKDEIIMISVATSDGVEKVLTWREVQGLEQVEVLQDEKEMLLRFAELIKEGDYDVIVGYNTDSFDFPYIRDRLKKLGISLPLGRLDAELEVSRRGALPEARIRGRAHVDLYPIVRRHVKLNSYVLESVVEELLGIKKEKLDGERLFTYWDEGGEKRALLARYALEDARVTLALAEKFLPLYCELSTIVGQSLNDVARMTSGQLVEWLLMRYATPRGELIPNHPAGGEYAARARATYAGGYVREPKRGLVEHIAVFDFRSFGPSIIVSHNIDPSTLIVGNCEENRAPELEYCFSLEREGFIPAILKELIRRRAEIKRELKRSEGDRRRTLSFAEKALKILANSFYGYMGYPRARWYRRECAESVAAFARMYIKQVMRIAEEEFKLEVVYGDTDSLFVVIPPEKRELAQKFLQKVNESMPGIIELEFEGFYRRGLFVTKKRYALLSEDGKMVVKGLEFVRRDWAPIARETQKEVLRILLEEADPEKAARLVRDVIERIRQRRVSLEDITIYTQLTKRIKSYKSLEPHVVAAQKLKERGREVAPGMIIGYIITKGTKGISQRATPVEFARLEDYDPEYYIDNQILPAIQRIFEAIGYTRDYLKEGITQTSLSRWF

SEQ ID NO: 2437 - protein, 792 aa, unidentified
  REGION 1..792: note = Description of Unknown: Synthetic polypeptide
MPRILKGFLIDADFETVEGRALIRLFLRGEEGSFVVYDDSFSPYFYALPGDEPERVKERILASGAAEAIQKVEIEEKRLFGTPRVALRITVSHPQDVPRIRERIRRVEGVDLILEHDILFVRRYLIDRGIKPLTWLRLEVEERDGRALLRGVEQLEEEPPELRVAAVAIAVYNPKGAPRSSKDEIIMISVATSDGVEKVLTWREVQGLEQVEVLQDEKEMLLRFAELIKEGDYDVIVGYNTDSFDFPYIRDRLKKLGISLPLGRLDAELEVSRRGALPEARIRGRAHVDLYPIVRRHVKLNSYVLESVVEELLGIKKEKLDGERLFTYWDEGGEKRALLARYALEDARVTLALAEKFLPLYCELSTIVGQSLNDVARMTSGQLVEWLLMRYATPRGELIPNHPAGEEYAARARATYAGGYVREPKRGLVEHIAVFDFRSFGPSIIVSHNIDPSTLIVGNCEENRAPELEYCFSLEREGFIPAILKELIRRRAEIKRELKRSEGDRRRTLSFAEKALKILANSFYGYMGYPRARWYRRECAESVAAFARMYIKQVMRIAEEEFKLEVVYGDTDSLFVVIPPEKRELAQKFLQKVNESMPGIIELEFEGFYRRGLFVTKKRYALLSEDGKMVVKGLEFVRRDWAPIARETQAEVLRILLEEADPEKAARLVRDVIERIRQRRVSLEDITIYTQLTKRIKSYKSLEPHVVAAQKLKERGREVAPGMIIGYIITKGTKGISQRATPVEFARLEDYDPEYYIDNQILPAIQRIFEAIGYTRDYLKEGITQTSLSRWF

SEQ ID NO: 2438 - protein, 792 aa, unidentified
  REGION 1..792: note = Description of Unknown: Synthetic polypeptide
MPRILKGFLIDADFETVEGRALIRLFLRGEEGSFVVYDDSFSPYFYALPGDEPERVKERILASGAAEAIQKVEIEEKRLFGTPRVALRITVSHPQDVPRIRERIRRVEGVDLILEHDILFVRRYLIDRGIKPLTWLRLEVEERDGRALLRGVEQLEEEPPELRVAAVAIAVYNPKGAPRSSKDEIIMISVATSDGVEKVLTWREVQGLEQVEVLQDEKEMLLRFAELIKEGDYDVIVGYNTDSFDFPYIRDRLKKLGISLPLGRLDAELEVSRRGALPEARIRGRAHVDLYPIVRRHVKLNSYVLESVVEELLGIKKEKLDGERLFTYWDEGGEKRALLARYALEDARVTLALAEKFLPLYCELSTIVGQSLNDVARMTSGQLVEWLLMRYATPRGELIPNHPAGEEYAARARATYAGGYVREPKRGLVEHIAVFDFRSFGPSIIVSHNIDPSTLIVGNCEENRAPELEYCFSLEREGFIPAILKELIRRRAEIKRELKRSEGDRRRTLSFAEKALKILANSFYGYMGYPRARWYRRECAESVAAFARMYIKQVMRIAEEEFKLEVVYGDTDSLFVVIPPEKRELAQKFLQKVNESMPGIIELEFEGFYRRGLFVTKKRYALLSEDGKMVVKGLERVRRDWAPIARETQKEVLRILLEEADPEKAARLVRDVIERIRQRRVSLEDITIYTQLTKRIKSYKSLEPHVVAAQKLKERGREVAPGMIIGYIITKGTKGISQRATPVEFARLEDYDPEYYIDNQILPAIQRIFEAIGYTRDYLKEGITQTSLSRWF

SEQ ID NO: 2439 - protein, 792 aa, unidentified
  REGION 1..792: note = Description of Unknown: Synthetic polypeptide
MPRILKGFLIDADFETVEGRALIRLFLRGEEGSFVVYDDSFSPYFYALPGDEPERVKERILASGAAEAIQKVEIEEKRLFGTPRVALRITVSHPQDVPRIRERIRRVEGVDLILEHDFLFVRRYLIDRGIKPLTWLRLEVEERDGRALLRGVEQLEEEPPELRVAAVAIAVYNPKGAPRSSKDEIIMISVATSDGVEKVLTWREVQGLEQVEVLQDEKEMLLRFAELIKEGDYDVIVGYNTDSFDFPYIRDRLKKLGISLPLGRLDAELEVSRRGALPEARIRGRAHVDLYPIVRRHVKLNSYVLESVVEELLGIKKEKLDGERLFTYWDEGGEKRALLARYALEDARVTLALAEKFLPLYCELSTIVGQSLNDVARMTSGQLVEWLLMRYATPRGELIPNHPAGEEYAARARATYAGGYVREPKRGLVEHIAVFDFRSFGPSIIVSHNIDPSTLIVGNCEENRAPELEYCFSLEREGFIPAILKELIRRRAEIKRELKRSEGDRRRTLSFAEKALKILANSFYGYMGYPRARWYRRECAESVAAFARMYIKQVMRIAEEEFKLEVVYGDTDSLFVVIPPEKRELAQKFLQKVNESMPGIIELEFEGFYRRGLFVTKKRYALLSEDGKMVVKGLEFVRRDWAPIARETQKEVLRILLEEADPEKAARLVRDVIERIRQRRVSLEDITIYTQLTKRIKSYKSLEPHVVAAQKLKERGREVAPGMIIGYIITKGTKGISQRATPVEFARLEDYDPEYYIDNQILPAIQRIFEAIGYTRDYLKEGITQTSLSRWF

SEQ ID NO: 2440 - protein, 792 aa, unidentified
  REGION 1..792: note = Description of Unknown: Synthetic polypeptide
MPRILKGFLIDADFETVEGRALIRLFLRGEEGSFVVYDDSFSPYFYALPGDEPERVKERILASGAAEAIQKVEIEEKRLFGTPRVALRITVSHPQDVPRIRERIRRVEGVDLILEHDILFVRRYLIDRGIKPLTWLRLEVEERDGRALLRGVEQLEEEPPELRVAAVAIAVYNPKGAPRSSKDEIIMISVATSDGVEKVLTWREVQGLEQVEVLQDEKEMLLRFAELIKEGDYDVIVGYNTDSFDFPYIRDRLKKLGISLPLGRLDAELEVSRRGALPEARIRGRAHVDLYPIVRRHVKLNSYVLESVVEELLGIKKEKLDGERLFTYWDEGGEKRALLARYALEDARVTLALAEKFLPLYCELSTIVGQSLNDVARMTSGQLVEWLLMRYATPRGELIPNHPAGEEYVARARATYAGGYVREPKRGLVEHIAVFDFRSFGPSIIVSHNIDPSTLIVGNCEENRAPELEYCFSLEREGFIPAILKELIRRRAEIKRELKRSEGDRRRTLSFAEKALKILANSFYGYMGYPRARWYRRECAESVAAFARMYIKQVMRIAEEEFKLEVVYGDTDSLFVVIPPEKRELAQKFLQKVNESMPGIIELEFEGFYRRGLFVTKKRYALLSEDGKMVVKGLEFVRRDWAPIARETQKEVLRILLEEADPEKAARLVRDVIERIRQRRVSLEDITIYTQLTKRIKSYKSLEPHVVAAQKLKERGREVAPGMIIGYIITKGTKGISQRATPVEFARLEDYDPEYYIDNQILPAIQRIFEAIGYTRDYLKEGITQTSLSRWF

SEQ ID NO: 2441 - protein, 792 aa, unidentified
  REGION 1..792: note = Description of Unknown: Synthetic polypeptide
MPRILKGFLIDADFETVEGRALIRLFLRGEEGSFVVYDDSFSPYFYALPGDEPERVKERILASGAAEAIQKVEIEEKRLFGTPRVALRITVSHPQDVPRIRERIRRVEGVDLILEHDILFVRRYLIDRGIKPLTWLRLEVEERDGRALLRGVEQLEEEPPELRVAAVAIAVYNPKGAPRSSKDEIIMISVATSDGVEKVLTWREVQGLEQVEVLQDEKEMLLRFAELIKEGDYDVIVGYNTDSFDFPYIRDRLKKLGISLPLGRLDAELEVSRRGALPEARIRGRAHVDLYPIVRRHVKLNSYVLESVVEELLGIKKEKLDGERLFTYWDEGGEKRALLARYALEDARVTLALAEKFLPLYCELSTIVGQSLNDVARMTSGQLVEWLLMRYATPRGELIPNHPAGEEYAARARATYAGGYVREPKRGLVEHIAVFDFRSFGPSIIVSHNIDPSTLIVGNCEENRAPELEYCFSLEREGFIPAILKELIRRRAEIKRELKRSEGDRRRTLSFAEKALKILANSFYGYMGYPRARWYRRECAESVAAFARMYIKQVMRIAEEEFKLEVVYGDTDSLFVVIPPEKRELAQKFLQKVNESMPGIIELEFESFYRRGLFVTKKRYALLSEDGKMVVKGLEFVRRDWAPIARETQKEVLRILLEEADPEKAARLVRDVIERIRQRRVSLEDITIYTQLTKRIKSYKSLEPHVVAAQKLKERGREVAPGMIIGYIITKGTKGISQRATPVEFARLEDYDPEYYIDNQILPAIQRIFEAIGYTRDYLKEGITQTSLSRWF

SEQ ID NO: 2442 - protein, 792 aa, unidentified
  REGION 1..792: note = Description of Unknown: Synthetic polypeptide
MPRILKGFLIDADFETVEGRALIRLFLRGEEGSFVVYDDSFSPYFYALPGDEPERVKERILASGAAEAIQKVEIEEKRLFGTPRVALRITVSHPQDVPRIRERIRRVEGVDLILEHDILFVRRYLIDRGIKPLTWLRLEVEERDGRALLRGVEQLEEEPPELRVAAVAIAVYNPKGAPRSSKDEIIMISVATSDGVEKVLTWREVQGLEQVEVLQDEKEMLLRFAELIKEGDYDVIVGYNTDSFDFPYIRDRLKKLGISLPLGRLDAELEVSRRGALPEARIRGRAHVDLYPIVRRHVKLNSYVLESVVEELLGIKKEKLDGERLFTYWDEGGEKRALLARYALEDARVTLALAEKFLPLYCELSTIVGQSLNDVARMTSGQLVEWLLMRYATPRGELIPNHPAGEEYAARARATYAGGYVREPKRGLVEHIAVFDFRSFGPSIIVSHNIDPSTLIVGNCEENRAPELEYCFSLEREGFIPAILKELIRRRAEIKRELKRSEGDRRRTLSFAEKALKILANSFYGYMGYPRARWYRRECAESVAAFARMYIKQVMRIAEEEFKLEVVYGDTDSLFVVIPPEKRELAQKFLQKVNESMPGIIELEFEGFYRRGLFVTKKRYALLSEDGKMVVKKLEFVRRRWAPIARETQKEVLRILLEEADPEKAARLVRDVIERIRQRRVSLEDITIYTQLTKRIKSYKRLEPHVVAAQKLKERGREVAPGMIIGYIITKGTKRISQRATPVEFARLEDYDPEYYIDNQILPAIQRIFEAIGYTRDYLKEGITQTSLSRWF

SEQ ID NO: 2443 - protein, 783 aa, unidentified
  REGION 1..783: note = Description of Unknown: Synthetic polypeptide
MPRILKGFLIDADFETVEGRALIRLFLRGEEGSFVVYDDSFSPYFYALPGDEPERVKERILASGAAEAIQKVEIEEKRLFGTPRVALRITVSHPQDVPRIRERIRRVEGVDLILEHDILFVRRYLIDRGIKPLTWLRLEVEERDGRALLRGVEQLEEEPPELRVAAVAIAVYNPKGAPRSSKDEIIMISVATSDGVEKVLTWREVQGLEQVEVLQDEKEMLLRFAELIKEGDYDVIVGYNTDSFDFPYIRDRLKKLGISLPLGRLDAELEVSRRGALPEARIRGRAHVDLYPIVRRHVKLNSYVLESVVEELLGIKKEKLDGERLFTYWDEGGEKRALLARYALEDARVTLALAEKFLPLYCELSTIVGQSLNDVARMTSGQLVEWLLMRYATPRGELIPNHPAGEEYAARARATYAGGYVREPKRGLVEHIAVFDFRSFGPSIIVSHNIDPSTLIVGNCEENRAPELEYCFSLEREGFIPAILKELIRRRAEIKRELKRSEGDRRRTLSFAEKALKILANSFYGYMGYPRARWYRRECAESVAAFARMYIKQVMRIAEEEFKLEVVYGDTDSLFVVIPPEKRELAQKFLQKVNESMPGIIELEFEGFYRRGLFVTKKRYALLSEDGKMVVKGLEFVRRDWAPIARETQKEVLRILLEEADPEKAARLVRDVIERIRQRRVSLEDITIYTQLTKRIKSYKSLEPHVVAAQKLKERGREVAPGMIIGYIITKGTKGISQRATPVEFARLEDYDPEYYIDNQILPAIQRIFEAIGYTRDYLKEGI

SEQ ID NO: 2444 - protein, 792 aa, unidentified
  REGION 1..792: note = Description of Unknown: Synthetic polypeptide
MPRILKGFLIDADFETVEGRALIRLFLRGEEGSFVVYDDSFSPYFYALPGDEPERVKERILASGAAEAIQKVEIEEKRLFGTPRVALRITVSHPQDVPRIRERIRRVEGVDLILEHDILFVRRYLIDRGIKPLTWLRLEVEERDGRALLRGVEQLEEEPPELRVAAVAIAVFNPKGAPRSSKDEIIMISVATSDGVEKVLTWREVQGLEQVEVLQDEKEMLLRFAELIKEGDYDVIVGYNTDSFDFPYIRDRLKKLGISLPLGRLDAELEVSRRGALPEARIRGRAHVDLYPIVRRHVKLNSYDLESVVEELLGIKKEKLDGERLFTYWDEGGEKRALLARYALEDARVTLALAEKFLPLYCELSTIVGQSLNDVARMTSGQLVEWLLMRYATPRGELIPNHPAGEEYAARARATYAGGYVREPKRGLVEHIAVFDFRSFGPSIIVSHNIDPSTLIVGNCEENRAPELEYCFSLEREGFIPAILKELIRRRAEIKRELKRSEGDRRRTLSFAEKALKILANSFYGYMGYPRARWYRRECAESVAAFARMYIKQVMRIAEEEFKLEVVYGDTDSLFVVIPPEKRELAQKFLQKVNESMPGIIELEFEGFYRRGLFVTKKRYALLSEDGKMVVKGLEFVRRDWAPIARETQKEVLRILLEEADPEKAARLVRDVIERIRQRRVSLEDITIYTQLTKRIKSYKSLEPHVVAAQKLKERGREVAPGMIIGYIITKGTKGISQRATPVEFARLEDYDPEYYIDNQILPAIQRIFEAIGYTRDYLKEGITQTSLSRWF

SEQ ID NO: 2445 - protein, 792 aa, unidentified
  REGION 1..792: note = Description of Unknown: Synthetic polypeptide
MPRILKGFLIDADFETVEGRALIRLFLRGEEGSFVVYDDSFSPYFYALPGDEPKRVKERILASGAAEAIQKVEIEEKRLFGTPRVALRITVSHPQDVPRIRERIRRVEGVGLILEHDILFVRRYLIDRGIKPLTWLRLEVEERDGRALLRGVEQLEEEPPELRVAAVAIAVYNPKGAPRSSKDEIIMISVATSDGVEKVLTWREVQGLEQVEVLQDEKEMLLRFAELIKERDYDVIVGYNTDSFDFPYIRDRLKKLGISLPLGRLDAELEVSRRGALPEARIRGRAHVDLYPIVRRHVKLNSYVLESVVEELLGIKKEKLDGERLFTYWDEGGEKRALLARYALEDARVTLALAEKFLPLYCELSTIVGQSLNDVARMTSGQLVEWLLMRYATPRGELIPNHPAGEEYAARARATYAGGYVREPKRGLVEHIAVFDFRSFGPSIIVSHNIDPSTLIVGNCEENRAPELEYCFSLEREGFIPAILKELIRRRAEIKRELKRSEGDRRRTLSFAEKALKILANSFYGYMGYPRARWYRRECAESVAAFARMYIKQVMRIAEEEFKLEVVYGDTDSLFVVIPPEKRELAQKFLQKVNESMPGIIELEFEGFYRRGLFVTKKRYALLSEDGKMVVKGLEFVRRDWAPIARETQKEVLRILLEEADPEKAARLVRDVIERIRQRRVSLEDITIYTQLTKRIKSYKSLEPHVVAAQKLKERGREVAPGMIIGYIITKGTKGISQRATPVEFARLEDYDPEYYIDNQILPAIQRIFEAIGYTRDYLKEGITQTSLSRWF

SEQ ID NO: 2446 - protein, 792 aa, unidentified
  REGION 1..792: note = Description of Unknown: Synthetic polypeptide
MPRILKGFLIDADFETVEGRALIRLFLRGEEGSFVVYDDSFSPYFYALPGDEPERVKERILASGAAEAIQKVEIEEKRLFGTPRVALRITVSHPQDVPRIRERIRRVEGVDLILEHDILFVRRYLIDRGIKPLTWLRLEVEERDGRALLRGVEQLEEEPPELRVAAVAIAVYNPKGAPRSSKDEIIMISVATSDGVEKVLTWREVQGLEQVEVLQDEKEMLLRFAELIKEGDYDVIVGYNTDSFDFPYIRDRLKKLGISLPLGRLDAELEVSRRGALPEARIRGRAHVDLYPIVRRHVKLNSYVLESVVEELLGIKKEKLDGERLFTYWDEGGEKRALLARYALEDARVTLALAEKFLPLYCELSTIVGQSLNDVARMTSGQLVEWLLMRYATPRGELIPNHPAGEEYAARARATYAGGYVREPKRGLVEHIAVFDFRSFGPSIIVLHNIDPSTLIVGNCEENRAPELEYCFSLEREGFIPAILKELIRRRAEIKRELKRSEGDRRRTLSFAEKALKILANSFYGYMGYPRARWYRRECAESVAAFARMYIKQVMRIAEEEFKLEVVYGDTDSLFVVIPPEKRELAQKFLQKVNESMPGIIELEFEGFYRRGLFVTKKRYALLSEDGKMVVKGLEFVRRDWAPIARETQKEVLRILLEEADPEKAARLVRDVIERIRQRRVSLEDITIYTQLTKRIKSYKSLEPHVVAAQKLKERGREVAPGMIIGYIITKGTKGISQRATPVEFARLEDYDPEYYIDNQILPAIQRIFEAIGYTRDYLKEGITQTSLSRWF

SEQ ID NO: 2447 - protein, 792 aa, unidentified
  REGION 1..792: note = Description of Unknown: Synthetic polypeptide
MPRILKGFLIDADFETVEGRALIRLFLRGEEGSFVVYDDSFSPYFYALPGDEPERVKERILASGAAEAIQKVEIEEKRLFGTPRVALRITVSHPQDVPRIRERIRRVEGVDLILEHDILFVRRYLIDRGIKPLTWLRLEVEERDGRALLRGVEQLEEEPPELRVAAVAIAVYNPKGAPRSSKDEIIMISVATSDGVEKVLTWREVQGLEQVEVLQDEKEMLLRFAELIEEGDYDVIVGYNTDSFDFPYIRDRLEKLGISLPLGRLDAELEVSRRGALPEARIRGRAHVDLYPIVRRHVKLNSYVLESVVEELLSIKKEKLDGERLFTYWDEGGERRALLARYALEDARVTLALAEKFLPLYCDLSTIVGQSLNDVARMTSGQLVEWLLMRYATPRGELIPNHPAGEEYAARARATYAGGYVREPKRGLVEHIAVFDFRSFGPSIIVSHNIDPSTLIVGNCEENRAPELEYCFSLEREGFIPAILKELIRRRAEIKRELKRSEGDRRRTLSFAEKALKILANSFYGYMGYPRARWYRRECAESVAAFARMYIKQVMRIAEEEFKLEVVYGDTDSLFVVIPPEKRELAQKFLQKVNESMPGIIELEFEGFYRRGLFVTKKRYALLSEDGKMVVKGLEFVRRDWAPIARETQKEVLRILLEEADPEKAARLVRDVIERIRQRRVSLEDITIYTQLTKRIKSYKSLEPHVVAAQKLKERGREVAPGMIIGYIITKGTKGISQRATPVEFARLEDYDPEYYIDNQILPAIQRIFEAIGYTRDYLKEGITQTSLSRWF

SEQ ID NO: 2448 - protein, 791 aa, unidentified
  REGION 1..791: note = Description of Unknown: Synthetic polypeptide
MPRILKGFLIDADFETVEGRALIRLFLRGEEGSFVVYDDSFSPYFYALPGDEPERVKERILASGAAEAIQKVEIEEKRLFGTPRVALRITVSHPQDVPRIRERIRRVEGVDLILEHDILFVRRYLIDRGIKPLTWLRLEVEERDGRALLRGVEQLEEEPPELRVAAVAIAVRNPKGAPRSSKDEIIMISVATSDGVEKVLTWREVQGLEQVEVLQDEKEMLLRFAELIKEGDYDVIVGYNTDSFDFPYIRDRLKKLGISLPLGRLDAELEVSRRGALPEARIRGRAHVDLYPIVRRHVKLNSYDLESVVEELLGIKKEKLDGERLFTYWDEGGEKRALLARYALEDARVTLALAEKFLPLYLELSTIVGQSLNDVARMTSGQLVEWLLMRYATPRGELIPNHPAGEEYAARARATYAGGYVREPKRGLVEHIAVFDFRSFGPSIIVSHNIDPSTLIVGNCEENRAPELEYCFSLEREGFIPAILKELIRRRAEIKRELKRSEGDRRRTLSFAEKALKILANSFYGYMGYPRARWYRRECAESVAAFARMYIKQVMRIAEEEFKLEVVYGDTDSLFVVIPPEKRELAQKFLQKVNESMPGIIELEFEGFYRRGLFVTKKRYALLSEDGKMVVKGLEFVRRDWAPIARETQKEVLRILLEEADPEKAARLVRDVIERIRQRRVSLEDITIYTQLTKRIKSYKSLEPHVVAAQKLKERGREVAPGMIIGYIITKGTKGISQRATPVEFARLEDYDPEYYIDNQILPAIQRIFEAIGYTRDYLKEGITQTSLSRR

SEQ ID NO: 2449 - protein, 791 aa, unidentified; identical to SEQ ID NO: 1802
  REGION 1..791: note = Description of Unknown: Synthetic polypeptide

SEQ ID NO: 2450 - protein, 792 aa, unidentified
  REGION 1..792: note = Description of Unknown: Synthetic polypeptide
MPRILKGFLIDADFETVEGRALIRLFLRGEEGSFVVYDDSFSPYFYALPGDEPERVKERILASGAAEAIQKVEIEEKRLFGTPRVALRITVSHPQDVPRIRERIRRVEGVDLILEHDILFVRRYLIDRGIKPLTWLRLEVEERDGRALLRGVEQLEEEPPELRVAAVAIAVYNPKGAPRSSKDEIIMISVATSDGVEKVLTWREVQGLEQVEVLQDEKEMLLRFAELIKEGDYDVIVGYNTDSFDFPYIRDRLKKLGISLPLGRLDAELEVSRRGALPEARIRGRAHVDLYPIVRRHVKLNSYVLESVVEELLGIKKEKLDGERLFTYWDEGGEKRALLARYALEDARVTLALAEKFLPLYCELSTIVGQSLNDVARMTSGQLVEWLLMRYATPRGELRPNHPAGEEYAARARATYAGGYVREPKRGLVEHIAVFDFRSFGPSIIVSHNIDPSTLIVGNCEENRAPELEYCFSLEREGFIPAILKELIRRRAEIKRELKRSEGDRRRTLSFAEKALKILANSFYGYMGYPRARWYRRECAESVAAFARMYIKQVMRIAEEEFKLEVVYGDTDSLFVVIPPEKRELAQKFLQKVNESMPGIIELEFEGFYRRGLFVTKKRYALLSEDGKMVVKGLEFVRRDWAPIARETQKEVLRILLEEADPEKAARLVRDVIERIRQRRVSLEDITIYTQLTKRIKSYKSLEPHVVAAQKLKERGREVAPGMIIGYIITKGTKGISQRATPVEFARLEDYDPEYYIDNQILPAIQRIFEAIGYTRDYLKEGITQTSLSRWF

SEQ ID NO: 2451 - protein, 792 aa, unidentified
  REGION 1..792: note = Description of Unknown: Synthetic polypeptide
MPRILKGFLIDADFETVEGRALIRLFLRGEEGSFVVYDDSFSPYFYALPGDEPERVKERILASGAAEAIQKVEIEEKRLFGTPRVALRITVSHPQDVPRIRERIRRVEGVDLILEHDILFVRRYLIDRGIKPLTWLRLEVEERDGRALLRGVEQLEEEPPELRVAAVAIAVYNPKGAPRSSKDEIIMISVATSDGVEKVLTWREVQGLEQVEVLQDEKEMLLRFAELIKEGDYDVIVGYNTDSFDFPYIRDRLKKLGISLPLGRLDAELEVSRRGALPEARIRGRAHVDLYPIVRRHVKLNSYVLESVVEELLGIKKEKLDGERLFTYWDEGGEKRALLARYALEDARVTLALAEKFLPLYCELSTIVGQSLNDVARMTSGQLVEWLLMRYATPRGELIPNHPAGEEYAARARATYAGGYVREPKRGLVEHIAVFDFRSFGPSIIVSHNIDPSTLIVGNCEENRAPELEYCFSLEREGFIPAILKELIRRRAEIKRELKRSEGDRRRTLSFAEKALKILANSFYGYMGYPRARWYRRECAESVAAFARMYIKQVMRIAEEEFKLEVVYGDTDSLFVVIPPEKRELAQKFLQKVNESMPGIIELEFEGFYRRGLFVTKKRYALLSEDGKMVVKGLEFVRRDWAPIARETQKEVLRILLEEADPEKAARLVRDVIKRIRQRRVSLEDITIYTQLTRRIKSYKSLEPHVVAAQKLKERGREVAPGMIIGYIITKGTKGISQRATPVEFARLEDYDPEYYIDNQILPAIQRIFEAIGYTRDYLKEGITQTSLSRWF

SEQ ID NO: 2452 - protein, 792 aa, unidentified
  REGION 1..792: note = Description of Unknown: Synthetic polypeptide
MPRILKGFLIDADFECVEGRALIRLFLRGEEGSFVVYDDSFSPYFYALPGDEPERVKERILASGAAEAIQKVEIEEKRLFGTPRVALRITVSHPQDVPRIRERIRRVEGVDLILEHDILFVRRYLIDRGIKPLTWLRLEVEERDGRALLRGVEQLEEEPPELRVAAVAIAVYNPKGAPRSSKDEIIMISVATSDGVEKVLTWREVQGLEQVEVLQDEKEMLLRFAELIKEGDYDVIVGYNTDSFDFPYIRDRLKKLGISLPLGRLDAELEVSRRGALPEARIRGRAHVDLYPIVRRHVKLNSYVLESVVEELLGIKKEKLDGERLFTYWDEGGEKRALLARYALEDARVTLALAEKFLPLYCELSTIVGQSLNDVARMTSGQLVEWLLMRYATPRGELIPNHPAGEEYAARARATYAGGYVREPKRGLVEHIAVFDFRSFGPSIIVSHNIDPSTLIVGNCEENRAPELEYCFSLEREGFIPAILKELIRRRAEIKRELKRSEGDRRRTLSFAEKALKILANSFYGYMGYPRARWYRRECAESVAAFARMYIKQVMRIAEEEFKLEVVYGDTDSLFVVIPPEKRELAQKFLQKVNESMPGIIELEFEGFYRRGLFVTKKRYALLSEDGKMVVKGLEFVRRDWAPIARETQKEVLRILLEEADPEKAARLVRDVIERIRQRRVSLEDITIYTQLTKRIKSYKSLEPHVVAAQKLKERGREVAPGMIIGYIITKGTKGISQRATPVEFARLEDYDPEYYIDNQILPAIQRIFEAIGYTRDYLKEGITQTSLSRWF

SEQ ID NO: 2453 - protein, 792 aa, unidentified
  REGION 1..792: note = Description of Unknown: Synthetic polypeptide
MPRILKGFLIDADFETVEGRALIRLFLRGEEGSFVVYDDSFSPYFYALPGDEPERVKERILASGAAEAIQKVEIEEKRLFGTPRVALRITVSHPQDVPRIRERIRRVEGVDLILEHDILFVRRYLIDRGIKPLTWLRLEVEERDGRALLRGVEQLEEEPPELRVAAVAIAVYNPKGAPRSSKDEIIMISVATSDGVEKVLTWREVQGLEQVEVLQDEKEMLLRFAELIKEGDYDVIVGYNTDSFDFPYIRDRLKKLGISLPLGRLDAELEVSRRGALPEARIRGRAHVDLYPIVRRHVKLNSYVLESVVEELLGIKKEKLDGERLFTYWDEGGEKRALLARYALEDARVTLALAEKFLPLYCDLSTIVGQSLNDVARMTSGQLVEWLLMRYATPRGELIPNHPAGEEYAARARATYAGGYVREPKRGLVEHIAVFDFRSFGPSIIVSHNIDPSTLIVGNCEENRAPELEYCFSLEREGFIPAILKELIRRRAEIKRELKRSEGDRRRTLSFAEKALKILANSFYGYMGYPRARWYRRECAESVAAFARMYIKQVMRIAEEEFKLEVVYGDTDSLFVVIPPEKRELAQKFLQKVNESMPGIIELEFEGFYRRGLFVTKKRYALLSEDGKMVVKGLEFVRRDWAPIARETQKEVLRILLEEADPEKAARLVRDVIERIRQRRVSLEDITIYTQLTKRIKSYKSLEPHVVAAQKLKERGREVAPGMIIGYIITKGTKGISQRATPVEFARLEDYDPEYYIDNQILPAIQRIFEAIGYTRDYLKEGITQTSLSRWF

SEQ ID NO: 2454 - protein, 792 aa, unidentified
  REGION 1..792: note = Description of Unknown: Synthetic polypeptide
MPRILKGFLIDADFETVEGRALIRLFLRGEEGSFVVYDDSFSPYFYALPGDEPERVKERILASGAAEAIQKVEIEEKRLFGTPRVALRITVSHPQDVPRIRERIRRVEGVDLILEHDILFVRRYLIDRGIKPLTWLRLEVEERDGRALLRGVEQLEEEPPELRVAAVAIAVYNPKGAPRSSKDEIIMISVATSDGVEKVLTWREVQGLEQVEVLQDEKEMLLRFAELIKEGDYDVIVGYNTDSFDFPYIRDRLKKLGISLPLGRLDAELEVSRRGALPEARIRGRAHVDLYPIVRRHVKLNSYVLESVVEELLGIKKEKLDGERLFTYLDEGGEKRALLARYALEDARVTLALAEKFLPLYCELSTIVGQSLNDVARMTSGQLVEWLLMRYATPRGELIPNHPAGEEYAARARATYAGGYVREPKRGLVEHIAVFDFRSFGPSIIVSHNIDPSTLIVGNCEENRAPELEYCFSLEREGFIPAILKELIRRRAEIKRELKRSEGDRRRTLSFAEKALKILANSFYGYMGYPRARWYRRECAESVAAFARMYIKQVMRIAEEEFKLEVVYGDTDSLFVVIPPEKRELAQKFLQKVNESMPGIIELEFEGFYRRGLFVTKKRYALLSEDGKMVVKGLEFVRRDWAPIARETQKEVLRILLEEADPEKAARLVRDVIERIRQRRVSLEDITIYTQLTKRIKSYKSLEPHVVAAQKLKERGREVAPGMIIGYIITKGTKGISQRATPVEFARLEDYDPEYYIDNQILPAIQRIFEAIGYTRDYLKEGITQTSLSRWF

SEQ ID NO: 2455 - protein, 792 aa, unidentified
  REGION 1..792: note = Description of Unknown: Synthetic polypeptide
MPRILKGFLIDADFETVEGRALIRLFLRGEEGSFVVYDDSFSPYFYALPGDEPERVKERILASGAAEAIQKVEIEEKRLFGTPRVALRITVSHPQDVPRIRERIRRVEGVDLILEHDILFVRRYLIDRGIKPLTWLRLEVEERDGRALLRGVEQLEEEPPELRVAAVAIAVYNPKGAPRSSKDEIIMISVATSDGVEKVLTWREVQGLEQVEVLQDEKEMLLRFAELIKEGDYDVIVGYNTDSFDFPYIRDRLKKLGISLPLGRLDAELEVSRRGALPEARIRGRAHVDLYPIVRRHVKLNSYVLESVVEELLGIKKEKLDGERLFTYWDEGGEKRALLARYALEDARVTLALAEKFLPLYLELSTIVGQSLNDVARMTSGQLVEWLLMRYATPRGELIPNHPAGEEYAARARATYAGGYVREPKRGLVEHIAVFDFRSFGPSIIVSHNIDPSTLIVGNCEENRAPELEYCFSLEREGFIPAILKELIRRRAEIKRELKRSEGDRRRTLSFAEKALKILANSFYGYMGYPRARWYRRECAESVAAFARMYIKQVMRIAEEEFKLEVVYGDTDSLFVVIPPEKRELAQKFLQSVNESMPGIIELEFEGFYRRGLFVTKKRYALLSEDGKMVVKGLEFVRRDWAPIARETQKEVLRILLEEADPEKAARLVRDVIERIRQRRVSLEDITIYTQLTKRIKSYKSLEPHVVAAQKLKERGREVAPGMIIGYIITKGTKGISQRATPVEFARLEDYDPEYYIDNQILPAIQRIFEAIGYTRDYLKEGITQTSLSRWF

SEQ ID NO: 2456 - protein, 792 aa, unidentified
  REGION 1..792: note = Description of Unknown: Synthetic polypeptide
MPRILKGFLIDADFETVEGRALIRLFLRGEEGSFVVYDDSFSPYFYALPGDEPERVKERILASGAAEAIQKVEIEEKRLFGTPRVALRITVSHPQDVPRIRERIRRVEGVDLILEHDILFVRRYLIDRGIKPLTWLRLEVEERDGRALLRGVEQLEEEPPELRVAAVAIAVYNPKGAPRSSKDEIIMISVATSDGVEKVLTWREVQGLEQVEVLQDEKEMLLRFAELIKEGDYDVIVGYNTDSFDFPYIRDRLKKLGISLPLGRLDAELEVSRRGALPEARIRGRAHVDLYPIVRRHVKLNSYVLESVVEELLGIKKEKLDGERLFTYWDEGGEKRALLARYALEDARVTLALAEKFLPLYCELSTIVGQSLNDVARMTSGQLVEWLLMRYATPRGELIPNHPAGEEYAARARATYAGGYVREPKRGLVEHIAVFDFRSFGPSIIVSHNIDPSTLIVGNCEENRAPELEYCFSLEREGFIPAILKELIRRRAEIKRELKRSEGDRRRTLSFAEKALKILANSFYGYMGYPRARWYRRECAESVAAFARMYIKQVMRIAEEEFKLEVVYGDTDSLFVVIPPEKRELAQKFLQKVNESMPGIIELEFEGFYRRGLFVTKKRYALLSEDGKMVVKGLEFVRNDWAPIARETQKEVLRILLEEADPEKAARLVRDVIERIRQRRVSLEDITIYTQLTKRIKSYKSLEPHVVAAQKLKERGREVAPGMIIGYIITKGTKGISQRATPVEFARLEDYDPEYYIDNQILPAIQRIFEAIGYTRDYLKEGITQTSLSRWF

SEQ ID NO: 2457 - protein, 792 aa, unidentified
  REGION 1..792: note = Description of Unknown: Synthetic polypeptide
MPRILKGFLIDADFETVEGRALIRLFLRGEEGSFVVYDDSFSPYFYALPGDEPERVKERILASGAAEAIQKVEIEEKRLFGTPRVALRITVSHPQDVPRIRERIRRVEGVDLILEHDILFVRRYLIDRGIKPLTWLRLEVEERDGRALLRGVEQLEEEPPELRVAAVAIAVYNPKGAPRSSKDEIIMISVATSDGVEKVLTWREVQGLEQVEVLQDEKEMLLRFAELIKEGDYDVIVGYNTDSFDFPYIRDRLKKLGISLPLGRLDAELEVSRRGALPEARIRGRAHVDLYPIVRRHVKLNSYVLESVVEELLGIKKEKLDGERLFTYYDEGGEKRALLARYALEDARVTLALAEKFLPLYCELSTIVGQSLNDVARMTSGQLVEWLLMRYATPRGELIPNHPAGEEYAARARATYAGGYVREPKRGLVEHIAVFDFRSFGPSIIVSHNIDPSTLIVGNCEENRAPELEYCFSLEREGFIPAILKELIRRRAEIKRELKRSEGDRRRTLSFAEKALKILANSFYGYMGYPRARWYRRECAESVAAFARMYIKQVMRIAEEEFKLEVVYGDTDSLFVVIPPEKRELAQKFLQKVNESMPGIIELEFEGFYRRGLFVTKKRYALLSEDGKMVVKGLEFVRRDWAPIARETQKEVLRILLEEADPEKAARLVRDVIERIRQRRVSLEDITIYTQLTKRIKSYKSLEPHVVAAQKLKERGREVAPGMIIGYIITKGTKGISQRATPVEFARLEDYDPEYYIDNQILPAIQRIFEAIGYTRDYLKEGITQTSLSRWF

SEQ ID NO: 2458 - protein, 792 aa, unidentified
  REGION 1..792: note = Description of Unknown: Synthetic polypeptide
MPRILKGFLIDADFETVEGRALIRLFLRGEEGSFVVYDDSFSPYFYALPGDEPERVKERILASGAAEAIQKVEIEEKRLFGTPRVALRITVSHPQDVPRIRERIRRVEGVDLILEHDILFVRRYLIDRGIKPLTWLRLEVEERDGRALLRGVEQLEEEPPELRVAAVAIAVYNPKGAPRSSKDEIIMISVATSDGVEKVLTWREVQGLEQVEVLQDEKEMLLRFAELIKEGDYDVIVGYNTDSFDFPYIRDRLKKLGISLPLGRLDAELEVSRRGALPEARIRGRAHVDLYPIVRRHVKLNSYDLESVVEELLGIKKEKLDGERLFTYWDEGGEKRALLARYALEDARVTLALAEKFLPLYCELSTIVGQSLNDVARMTSGQLVEWLLMRYATPRGELIPNHPAGEEYAARARATYAGGYVREPKRGLVEHIAVFDFRSFGPSIIVSHNIDPSTLIVGNCEENRAPELEYCFSLEREGFIPAILKELIRRRAEIKRELKRSEGDRRRTLSFAEKALKILANSFYGYMGYPRARWYRRECAESVAAFARMYIKQVMRIAEEEFKLEVVYGDTDSLFVVIPPEKRELAQKFLQKVNESMPGIIELEFEGFYRRGLFVTKKRYALLSEDGKMVVKGLEFVRRDFAPIARETQKEVLRILLEEADPEKAARLVRDVIERIRQRRVSLEDITIYTQLTKRIKSYKSLEPHVVAAQKLKERGREVAPGMIIGYIITKGTKGISQRATPVEFARLEDYDPEYYIDNQILPAIQRIFEAIGYTRDYLKEGITQTSLSRWF

SEQ ID NO: 2459 - protein, 792 aa, unidentified
  REGION 1..792: note = Description of Unknown: Synthetic polypeptide
MPRILKGFLIDADFETVEGRALIRLFLRGEEGSFVVYDDSFSPYFYALPGDEPERVKERILASGAAEAIQKVEIEEKRLFGTPRVALRITVSHPQDVPRIRERIRRVEGVDLILEHDILFVRRYLIDRGIKPLTWLRLEVEERDGRALLRGVEQLEEEPPELRVAAVAIAVYNPKGAPRSSKDEIIMISVATSDGVEKVLTWREVQGLEQVEVLQDEKEMLLRFAELIKEGDYDVIVGYNTDSFDFPYIHDRLKKLGISLPLGRLDAELEVSRRGALPEARIRGRAHVDLYPIVRRHVKLNSYVLESVVEELLGIKKEKLDGERLFTYWDEGGEKRALLARYALEDARVTLALAEKFLPLYCDLSTIVGQSLNDVARMTSGQLVEWLLMRYATPRGELIPNHPAGEEYAARARATYAGGYVREPKRGLVEHIAVFDFRSFGPSIIVSHNIDPSTLIVGNCEENRAPELEYCFSLEREGFIPAILKELIRRRAEIKRELKRSEGDRRRTLSFAEKALKILANSFYGYMGYPRARWYRRECAESVAAFARMYIKQVMRIAEEEFKLEVVYGDTDSLFVVIPPEKRELAQKFLQKVNESMPGIIELEFEGFYRRGLFVTKKRYALLSEDGKMVVKGLEFVRRDWAPIARETQKEVLRILLEEADPEKAARLVRDVIERIRQRRVSLEDITIYTQLTKRIKSYKSLEPHVVAAQKLKERGREVAPGMIIGYIITKGTKGISQRATPVEFARLEDYDPEYYIDNQILPAIQRIFEAIGYTRDYLKEGITQTSLSRWF

SEQ ID NO: 2460 - protein, 792 aa, unidentified
  REGION 1..792: note = Description of Unknown: Synthetic polypeptide
MPRILKGFLIDADFETVEGRALIRLFLRGEEGSFVVYDDSFSPYFYALPGDEPERVKERILASGAAEAIQKVEIEEKRLFGTPRVALRITVSHPQDVPRIRERIRRVEGVDLILEHDILFVRRYLIDRGIKPLTWLRLEVEERDGRALLRGVEQLEEEPPELRVAAVAIAVYNPKGAPRSSKDEIIMISVATSDGVEKVLTWREVQGLEQVEVLQDEKEMLLRFAELIKEGDYDVIVGYNTDSFDFPYIRDRLKKLGISLPLGRLDAELEVSRRGALPEARIRGRAHVDLYPIVRRHVKLNSYVLESVVEELLGIKKEKLDGERLFTYWDEGGEKRALLARYALEAARVTLALAEKFLPLYCELSTIVGQSLNDVARMTSGQLVEWLLMRYATPRGELIPNHPAGEEYAARARATYAGGYVREPKRGLVEHIAVFDFRSFGPSIIVSHNIDPSTLIVGNCEENRAPELEYCFSLEREGFIPAILKELIRRRAEIKRELKRSEGDRRRTLSFAEKALKILANSFYGYMGYPRARWYRRECAESVAAFARMYIKQVMRIAEEEFKLEVVYGDTDSLFVVIPPEKRELAQKFLQKVNESMPGIIELEFEGFYRRGLFVTKKRYALLSEDGKMVVKGLEFVRRDWAPIARETQKEVLRILLEEADPEKAARLVRDVIERIRQRRVSLEDITIYTQLTKRIKSYKSLEPHVVAAQKLKERGREVAPGMIIGYIITKGTKGISQRATPVEFARLEDYDPEYYIDNQILPAVQRIFEAIGYTRDYLKEGITQTSLSRWF

SEQ ID NO: 2461 - protein, 792 aa, unidentified
  REGION 1..792: note = Description of Unknown: Synthetic polypeptide
MPRILKGFLIDADFETVEGRALIRLFLRGEEGSFVVYDDSFSPYFYALPGDEPERVKERILASGAAEAIQKVEIEEKRLFGTPRVALRITVSHPQDVPRIRERIRRVEGVDLILEHDILFVRRYLIDRGIKPLTWLRLEVEERDGRALLRGVEQLEEEPPELRVAAVAIAVYNPKGAPRSSKDEIIMISVATSDGVEKVLTWREVQGLEQVEVLQDEKEMLLRFAELIKEGDYDVIVGYNTDSFDFPYIRDRLKKLGISLPLGRLDAELEVSRRGALPEARIRGRAHVDLYPIVRRHVKLNSYVLESVVEELLGIKKEKLDGERLFTYWDEGGEKRALLARYALEDARVTLALAEKFLPLYCELSTIVGQSLNDVARMTSGQLVEWLLMRYATPRGELIPNHPAGEEYAARARATYAGGYVREPKRGLVEHIAVFDFRSFGPSIIVSHNIDPSTLIVGNCEENRAPELEYCFSLEREGFIPAILKELIRRRAEIKRELKRSEGDRRRTLSFAEKALKILANSFYGYMGYPRARWYRRECAESVAAFARMYIKQVMRIAEEEFKLEVVYGDTDSLFVVIPPEKRELAQKFLQKVNESMPGIIELEFEGFYRRGLFVTKKRYALLSEDGKMVVKGLEFVRRDWAPIARETQKEVLRILLEEADPEKAARLVRDVIERIRQRRVSLEDITIYTQLTKRIKSYKSLEPHVVAAQKLKERGREVAPGMIIGYIITKGTKGISQRATPVEFARLEDYDPEYYIDNQILPAIQRIFEAIGYTRDYLKEGITQTSLSRTF

SEQ ID NO: 2462 - protein, 792 aa, unidentified
  REGION 1..792: note = Description of Unknown: Synthetic polypeptide
MPRILKGFLIDADFETVEGRALIRLFLRGEEGSFVVYDDSFSPYFYALPGDEPERVKERILASGAAEAIQKVEIEEKRLFGTPRVALRITVSHPQDVPRIRERIRRVEGVDLILEHDILFVRRYLIDRGIKPLTWLRLEVEERDGRALLRGVEQLEEEPPELRVAAVAIAVYNPKGAPRSSKDEIIMISVATSDRVEKVLTWREVQGLEQVEVLQDEKEMLLRFAELIKEGDYDVIVGYNTDSFDFPYIRDRLKKLGISLPLGRLDAELEVSRRGALPEARIRGRAHVDLYPIVRRHVKLNSYVLESVVEELLGIKKEKLDGERLFTYWDEGGEKRALLARYALEDARVTLALAEKFLPLYCELSTIVGQSLNDVARMTSGQLVEWLLMRYATPRGELIPNHPAGEEYAARARATYAGGYVREPKRGLVEHIAVFDFRSFGPSIIVSHNIDPSTLIVGNCEENRAPELEYCFSLEREGFIPAILKELIRRRAEIKRELKRSEGDRRRTLSFAEKALKILANSFYGYMGYPRARWYRRECAESVAAFARMYIKQVMRIAEEEFKLEVVYGDTDSLFVVIPPEKRELAQKFLQKVNESMPGIIELEFEGFYRRGLFVTKKRYALLSEDGKMVVKGLEFVRRDWAPIARETQKEVLRILLEEADPEKAARLVRDVIERIRQRRVSLEDITIYTQLTKRIKSYKSLEPHVVAAQKLKERGREVAPGMIIGYIITKGTKGISQRATPVEFARLEDYDPEYYIDNQILPAIQRIFEAIGYTRDYLKEGITQTSLSRWF

SEQ ID NO: 2463 - protein, 792 aa, unidentified
  REGION 1..792: note = Description of Unknown: Synthetic polypeptide
MPRILKGFLIDADFETVEGRALIRLFLRGEEGSFVVYDDSFSPYFYALPGDEPERVKERILASGAAEAIQKVEIEEKRLFGTPRVALRITVSHPQDVPRIRERIRRVEGVDLILEHDILFVRRYLIDRGIKPLTWLRLEVEERDGRALLRGVEQLEEEPPELRVAAVAIAVYNPKGAPRSSKDEIIMISVATSDGVEKVLTWREVQGLEQVEVLQDEKEMLLRFAELIKEGDYDVIVGYNTDSFDFPYIRDRLKKLGISLPLGRLDAELEVSRRGALPEARIRGRAHVDLYPIVRRHVKLNSYVLESVVEELLGIKKEKLDGERLFTYWDEGGEKRALLARYALEDARVTLALAEKFLPLYCELSTIVGQSLNDVARMTSGQLVEWLLMRYATPRGELIPNHPAGEEYAARARATYAGGYVREPKRGLVEHIAVFDFRSFGPSIIVSHNIDPSTLIVGNCEENRAPELEYCFSLEREGFIPAILKELIRRRAEIKRELKRSEGDRRRTLSFAEKALKILANSFYGYMGYPRARWYRRECAESVAAFARMYIKQVMRIAEEEFKLEVVYGDTDSLFVVIPPEKRELAQKFLQKVNESMPGIIELEFEGFYRRGLFVTKKDYALLSEDGKMVVKGLEFVRRDWAPIARETQKEVLRILLEEADPEKAARLVRDVIERIRQRRVSLEDITIYTQLTKRIKSYKSLEPHVVAAQKLKERGREVAPGMIIGYIITKGTKGISQRATPVEFARLEDYDPEYYIDNQILPAIQRIFEAIGYTRDYLKEGITQTSLSRWF

SEQ ID NO: 2464 - protein, 792 aa, unidentified
  REGION 1..792: note = Description of Unknown: Synthetic polypeptide
MPRILKGFLIDADFETVEGRALIRLFLRGEEGSFVVYDDSFSPYFYALPGDEPERVKERILASGAAEAIQKVEIEEKRLFGTPRVALRITVSHPQDVPRIRERIRRVEGVDLILEHDILFVRRYLFDRGIKPLTWLRLEVEERDGRALLRGVEQLEEEPPELRVAAVAIAVYNPKGAPRSSKDEIIMISVATSDGVEKVLTWREVQGLEQVEVLQDEKEMLLRFAELIKEGDYDVIVGYNTDSFDFPYIRDRLKKLGISLPLGRLDAELEVSRRGALPEARIRGRAHVDLYPIVRRHVKLNSYVLESVVEELLGIKKEKLDGERLFTYWDEGGEKRALLARYALEDARVTLALAEKFLPLYCELSTIVGQSLNDVARMTSGQLVEWLLMRYATPRGELIPNHPAGEEYAARARATYAGGYVREPKRGLVEHIAVFDFRSFGPSIIVSHNIDPSTLIVGNCEENRAPELEYCFSLEREGFIPAILKELIRRRAEIKRELKRSEGDRRRTLSFAEKALKILANSFYGYMGYPRARWYRRECAESVAAFARMYIKQVMRIAEEEFKLEVVYGDTDSLFVVIPPEKRELAQKFLQKVNESMPGIIELEFEGFYRRGLFVTKKRYALLSEDGKMVVKGLEFVRRDWAPIARETQKEVLRILLEEADPEKAARLVRDVIERIRQRRVSLEDITIYTQLTKRIKSYKSLEPHVVAAQKLKERGREVAPGMIIGYIITKGTKGISQRATPVEFARLEDYDPEYYIDNQILPAIQRIFEAIGYTRDYLKEGITQTSLSRWF

SEQ ID NO: 2465 - protein, 792 aa, unidentified
  REGION 1..792: note = Description of Unknown: Synthetic polypeptide
MPRILKGFLIDADFETVEGRALIRLFLRGEEGSFVVYDDSFSPYFYALPGDEPERVKERILASGAAEAIQKVEIEEKRLFGTPRVALRITVSHPQDVPRIRERIRRVEGVDLILEHDILFVRRYLIDRGIKPLTWLRLEVEERDGRALLRGVEQLEEEPPELRVAAVAIAVYNPKGAPRSSKDEIIMISVATSDGVEKVLTWREVQGLEQVEVLQDEKEMLLRFAELIKEGDYDVIVGYNTDSFDFPYIRDRLKKLGISLPLGRLDAELEVSRRGALPEARIRGRAHVDLYPIVRRHVKLNSYVLESVVEELLGIKKEKLDGERLFTYWDEGGEKRALLARYALEDARVTLALAEKFLPLYLELSTIVGQSLNDVARMTSGQLVEWLLMRYATPRGELIPNHPAGEEYAARARATYAGGYVREPKRGLVEHIAVFDFRSFGPSIIVSHNIDPSTLIVGNCEENRAPELEYCFSLEREGFIPAILKELIRRRAEIKRELKRSEGDRRRTLSFAEKALKILANSFYGYMGYPRARWYRRECAESVAAFARMYIKQVMRIAEEEFKLEVVYGDTDSLFVVNPPEKRELAQKFLQKVNESMPGIIELEFEGFYRRGLFVTKKRYALLSEDGKMVVKGLEFVRRDWAPIARETQKEVLRILLEEADPEKAARLVRDVIERIRQRRVSLEDITIYTQLTKRIKSYKSLEPHVVAAQKLKERGREVAPGMIIGYIITKGTKGISQRATPVEFARLEDYDPEYYIDNQILPAIQRIFEAIGYTRDYLKEGITQTSLSRWF

SEQ ID NO: 2466 - protein, 792 aa, unidentified
  REGION 1..792: note = Description of Unknown: Synthetic polypeptide
MPRILKGFLIDADFETVEGRALIRLFLRGEEGSFVVYDDSFSPYFYAHPGDEPERVKERILASGAAEAIQKVEIEEKRLFGTPRVALRITVSHPQDVPRIRERIRRVEGVDLILEHDILFVRRYLIDRGIKPLTWLRLEVEERDGRALLRGVEQLEEEPPELRVAAVAIAVYNPKGAPRSSKDEIIMISVATSDGVEKVLTWREVQGLEQVEVLQDEKEMLLRFAELIKEGDYDVIVGYNTDSFDFPYIRDRLKKLGISLPLGRLDAELEVSRRGALPEARIRGRAHVDLYPIVRRHVKLNSYDLESVVEELLGIKKEKLDGERLFTYWDEGGEKRALLARYALEDARVTLALAEKFLPLYCELSTIVGQSLNDVARMTSGQLVEWLLMRYATPRGELIPNHPAGEEYAARARATYAGGYVREPKRGLVEHIAVFDFRSFGPSIIVSHNIDPSTLIVGNCEENRAPELEYCFSLEREGFIPAILKELIRRRAEIKRELKRSEGDRRRTLSFAEKALKILANSFYGYMGYPRARWYRRECAESVAAFARMYIKQVMRIAEEEFKLEVVYGDTDSLFVVIPPEKRELAQKFLQKVNESMPGIIELEFEGFYRRGLFVTKKRYALLSEDGKMVVKGLEFVRRDWAPIARETQKEVLRILLEEADPEKAARLVRDVIERIRQRRVSLEDITIYTQLTKRIKSYKSLEPHVVAAQKLKERGREVAPGMIIGYIITKGTKGISQRATPVEFARLEDYDPEYYIDNQILPAIQRIFEAIGYTRDYLKEGITQTSLSRWF

SEQ ID NO: 2467 - protein, 792 aa, unidentified
  REGION 1..792: note = Description of Unknown: Synthetic polypeptide
MPRILKGFLIDADFETVEGRALIRLFLRGEEGSFVVYDDSFSPYFYALPGDEPERVKERILASGAAEAIQKVEIEEKRLFGTPRVALRITVSHPQDVPRIRERIRRVEGVDLILEHDILFVRRYLIDRGIKPLTWLRLEVEERDGRALLRGVEQLEEEPPELRVAAVAIAVYNPKGAPRSSKDEIIMISVATSDGVEKVLTWREVQGLEQVEVLQDEKEMLLRFAELIKEGDYDVIVGYNTDSFDFPYIRDRLKKLGISLPLGRLDAELEVSRRGALPEARIRGRAHVDLYPIVRRHVKLNSYVLESVVEELLGIKKEKLDGERLFTYWDEGGEKRALLARYALEDARVTLALAEKFLPLYCELSTIVGQSLNDVARMTSGQLVEWLLMRYATPRGELIPNHPAGEEYAARARATYAGGYVREPKRGLVEHIAVFDFRSFGPSIIVSHNIDPSTLIVGNCEENRAPELEYCFSLEREGFIPAILKELIRRRAEIKRELKRSEGDRRRTLSFAEKALKILARSFYGYMGYPRARWYRRECAESVAAFARMYIKQVMRIAEEEFKLEVVYGDTDSLFVVIPPEKRELAQKFLQKVNESMPGIIELEFEGFYRRGLFVTKKRYALLSEDGKMVVKGLEFVRRDWAPIARETQKEVLRILLEEADPEKAARLVRDVIERIRQRRVSLEDITIYTQLTKRIKSYKSLEPHVVAAQKLKERGREVAPGMIIGYIITKGTKGISQRATPVEFARLEDYDPEYYIDNQILPAIQRIFEAIGYTRDYLKEGITQTSLSRWF

SEQ ID NO: 2468 - protein, 792 aa, unidentified; identical to SEQ ID NO: 1760
  REGION 1..792: note = Description of Unknown: Synthetic polypeptide

SEQ ID NO: 2469 - protein, 792 aa, unidentified
  REGION 1..792: note = Description of Unknown: Synthetic polypeptide
MPRILKGFLIDADFETVEGRALIRLFLRGEEGSFVVYDDSFSPYFYALPGDEPERVKERILASGAAEAIQKVEIEEKRLFGTPRVALRITVSHPQDVPRIRERIRRVEGVDLILEHDILFVRRYLIDRGIKPLTWLRLEVEERGGRALLRGVEQLEEEPPELRVAAVAIAVYNPKGAPRSSKDEIIMISVATSDGVEKVLTWREVQGLEQVEVLQDEKEMLLRFAELIKEGDYDVIVGYNTDSFDFPYIRDRLKKLGISLPLGRLDAELEVSRRGALPEARIRGRAHVDLYPIVRRHVKLNSYVLESVVEELLGIKKEKLDGERLFTYWDEGGEKRALLARYALEDARVTLALAEKFLPLYCELSTIVGQSLNDVARMTSGQLVEWLLMRYATPRGELIPNHPAGEEYAARARATYAGGYVREPKRGLVEHIAVFDFRSFGPSIIVSHNIDPSTLIVGNCEENRAPELEYCFSLEREGFIPAILKELIRRRAEIKRELKRSEGDRRRTLSFAEKALKILANSFYGYMGYPRARWYRRECAESVAAFARMYIKQVMRIAEEEFKLEVVYGDTDSLFVVIPPEKRELAQKFLQKVNESMPGIIELEFEGFYRRGLFVTKKRYALLSEDGKMVVKGLEFVRRDWAPIARETQKEVLRILLEEADPEKAARLVRDVIERIRQRRVSLEDITIYTQLTKRIKSYKSLEPHVVAAQKLKERGREVAPGMIIGYIITKGTKGISQRATPVEFARLEDYDPEYYIDNQILPAIQRIFEAIGYTRDYLKEGITQTSLSRWF

SEQ ID NO: 2470 - protein, 792 aa, unidentified
  REGION 1..792: note = Description of Unknown: Synthetic polypeptide
MPRILKGFLIDADFETVEGRALIRLFLRGEEGSFVVYDDSFSPYFYALPGDEPERVKERILASGAAEAIQKVEIEEKRLFGTPRVALRITVSHPQDVPRIRERIRRVEGVDLILEHDILFVRRYLIDRGIKPLTWLRLEVEERDGRALLRGVEQLEEEPPELRVAAVAIAVYNPKGAPRSSKDEIIMISVATSDGVEKVLTWREVQGLEQVEVLQDEKEMLLRFAELIKEGDYDVIVGYNTDSFDFPYIRDRLKKLGISLPLGRLDAELEVSRRGALPEARIRGRAHVDLYPIVRRHVKLNSYVLESVVEELLGIKKEKLDGERLFTYDDEGGEKRALLARYALEDARVTLALAEKFLPLYCELSTIVGQSLNDVARMTSGQLVEWLLMRYATPRGELIPNHPAGEEYAARARATYAGGYVREPKRGLVEHIAVFDFRSFGPSIIVSHNIDPSTLIVGNCEENRAPELEYCFSLEREGFIPAILKELIRRRAEIKRELKRSEGDRRRTLSFAEKALKILANSFYGYMGYPRARWYRRECAESVAAFARMYIKQVMRIAEEEFKLEVVYGDTDSLFVVIPPEKRELAQKFLQKVNESMPGIIELEFEGFYRRGLFVTKKRYALLSEDGKMVVKGLEFVRRDWAPIARETQKEVLRILLEEADPEKAARLVRDVIERIRQRRVSLEDITIYTQLTKRIKSYKSLEPHVVAAQKLKERGREVAPGMIIGYIITKGTKGISQRATPVEFARLEDYDPEYYIDNQILPAIQRIFEAIGYTRDYLKEGITQTSLSRWF

SEQ ID NO: 2471 - protein, 792 aa, unidentified
  REGION 1..792: note = Description of Unknown: Synthetic polypeptide
MPRILKGFLIDADFETVEGRALIRLFLRGEEGSFVVYDDSFSPYFYALPGDEPERVKERILASGAAEAIQKVEIEEKRLFGTPRVALRITVSHPQDVPRIRERIRRVEGVDLILEHDILFVRRYLIDRGIKPLTWLRLEVEERDGRALLRGVEQLEEEPPELRVAAVAIAVYNPKGAPRSSKDEIIMISVATSDGVEKVLTWREVQGLEQVEVLQDEKEMLLRFAELIKEGDYDVIVGYNTDSFDFPYIRDRLKKLGISLPLGRLDAELEVSRRGALPEARIRGRAHVDLYPIVRRHVKLNSYDLESVVEELLGIKKEKLDGERLFTYWDEGGEKRALLARYALEDARVTLALAEKFLPLYCELSTIVGQSLNDVARMTSGQLVEWLLMRYATPRGELIPNHPAGEEYAARARATYAGGYVREPKRGLVEHIAVFDFRSFGPSIIVSHNIDPSTLIVGNCEENRAPELEYCFSLEREGFIPAILKELIRRRAEIKRELKRSEGDRRRTLSFAEKALKILASSFYGYMGYPRARWYRRECAESVAAFARMYIKQVMRIAEEEFKLEVVYGDTDSLFVVIPPEKRELAQKFLQKVNESMPGIIELEFEGFYRRGLFVTKKRYALLSEDGKMVVKGLEFVRRDWAPIARETQKEVLRILLEEADPEKAARLVRDVIERIRQRRVSLEDITIYTQLTKRIKSYKSLEPHVVAAQKLKERGREVAPGMIIGYIITKGTKGISQRATPVEFARLEDYDPEYYIDNQILPAIQRIFEAIGYTRDYLKEGITQTSLSRWF

SEQ ID NO: 2472 - protein, 792 aa, unidentified
  REGION 1..792: note = Description of Unknown: Synthetic polypeptide
MPRILKGFLIDADFETVEGRALIRLFQRGEEGSFVVYDDSFSPYFYALPGDEPERVKERILASGAAEAIQKVEIEEKRLFGTPRVALRITVSHPQDVPRIRERIRRVEGVDLILEHDILFVRRYLIDRGIKPLTWLRLEVEERDGRALLRGVEQLEEEPPELRVAAVAIAVYNPKGAPRSSKDEIIMISVATSDGVEKVLTWREVQGLEQVEVLQDEKEMLLRFAELIKEGDYDVIVGYNTDSFDFPYIRDRLKKLGISLPLGRLDAELEVSRRGALPEARIRGRAHVDLYPIVRRHVKLNSYVLESVVEELLGIKKEKLDGERLFTYWDEGGEKRALLARYALEDARVTLALAEKFLPLYCELSTIVGQSLNDVARMTSGQLVEWLLMRYATPRGELIPNHPAGEEYAARARATYAGGYVREPKRGLVEHIAVFDFRSFGPSIIVSHNIDPSTLIVGNCEENRAPELEYCFSLEREGFIPAILKELIRRRAEIKRELKRSEGDRRRTLSFAEKALKILANSFYGYMGYPRARWYRRECAESVAAFARMYIKQVMRIAEEEFKLEVVYGDTDSLFVVIPPEKRELAQKFLQKVNESMPGIIELEFEGFYRRGLFVTKKRYALLSEDGKMVVKGLEFVRRDWAPIARETQKEVLRILLEEADPEKAARLVRDVIERIRQRRVSLEDITIYTQLTKRIKSYKSLEPHVVAAQKLKERGREVAPGMIIGYIITKGTKGISQRATPVEFARLEDYDPEYYIDNQILPAIQRIFEAIGYTRDYLKEGITQTSLSRWF

SEQ ID NO: 2473 - protein, 792 aa, unidentified
  REGION 1..792: note = Description of Unknown: Synthetic polypeptide
MPRILKGFLIDADFETVEGRALIRLFLRGEEGSFVVYDDSFSPYFYALPGDEPERVKERILASGAAEAIQKVEIEEKRLFGTPRVALRITVSHPQDVPRIRERIRRVEGVDLILEHDILFVRRYLIDRGIKPLTWLRLEVEERDGRALLRGVEQLEEEPPELRVAAVAIAVYNPKGAPRSSKDEIIMISVATSDGVEKVLTWREVQGLEQVEVLQDEKEMLLRFAELIKEGDYDVIVGYNTDSFDFPYIRDRLKKLGISLPLGRLDAELEVSRRGALPEARIRGRAHVDLYPIVRRHVKLNSYVLESVVEELLGIKKEKLDGERLFTYWDEGGEKRALLARYALEDARVTLALAEKFLPLYCELSTIVGQSLNDVARMTSGQLVEWLLMRYATPRGELIPNHPAGEEYAARARATYAGGYVREPKRGLVEHIAVFDFRSFGPSIIVSHNIDPSTLIVGNCEENRAPELEYCFSLEREGFIPAILKELIRRRAEIKRELKRSEGDRRRTLSFAEKALKILANSFYGYMGYPRARWYCRECAESVAAFARMYIKQVMRIAEEEFKLEVVYGDTDSLFVVIPPEKRELAQKFLQKVNESMPGIIELEFEGFYRRGLFVTKKRYALLSEDGKMVVKGLEFVRRDWAPIARETQKEVLRILLEEADPEKAARLVRDVIERIRQRRVSLEDITIYTQLTKRIKSYKSLEPHVVAAQKLKERGREVAPGMIIGYIITKGTKGISQRATPVEFARLEDYDPEYYIDNQILPAIQRIFEAIGYTRDYLKEGITQTSLSRWF

SEQ ID NO: 2474 - protein, 792 aa, unidentified
  REGION 1..792: note = Description of Unknown: Synthetic polypeptide
MPRILKGFLIDADFETVEGRALIRLFLRGEEGSFVVYDDSFSPYFYALPGDEPERVKERILASGAAEAIQKVEIEEKRLFGTPRVALRITVSHPQDVPRIRERIRRVEGVDLILEHDILFVRRYLIDRGIKPLTWLRLEVEERDGRALLRGVEQLEEEPPELRVAAVAIAVYNPKGAPRSSKDEIIMISVATSDGVEKVLTWREVQGLEQVEVLQDEKEMLLRFAELIKEGDYDVIVGYNTDSFDFPYIRDRLKKLGISLPLGRLDAELEVSRRGALPEARIRGRAHVDLYPIVRRHVKLNSYDLESVVEELLGIKKEKLDGERLFTYWDEGGEKRALLARYALEDARVTLALAEKFLPLYCELSTIVGQSLNDVARMTSGQLVEWLLMRYATPRGELIPNHPAGEEYAARARATYAGGYVREPKRGLVEHIAVFDFRSFGPSIIVSHNIDPSTLIVGNCEENRAPELEYCFSLEREGFIPAILKELIRRRAEIKRELKRSEGDRRRTLSFAEKALKILANSFYGYMGYPRARWYRRECAESVAAFARMYIKQVMRIAEEEFKLEVVYGDTDSLFVVIPPEKRELAQKFLQKVNESMPGIIELEFEGFYRRGLFVTKKRYALLSEDGKMVVKGLEFVRRDRAPIARETQKEVLRILLEEADPEKAARLVRDVIERIRQRRVSLEDITIYTQLTKRIKSYKSLEPHVVAAQKLKERGREVAPGMIIGYIITKGTKGISQRATPVEFARLEDYDPEYYIDNQILPAIQRIFEAIGYTRDYLKEGITQTSLSRWF

SEQ ID NO: 2475 - protein, 792 aa, unidentified
  REGION 1..792: note = Description of Unknown: Synthetic polypeptide
MPRILKGFLIDADFETVEGRALIRLFLRGEEGSFVVYDDSFSPYFYALPGDEPERVKERILASGAAEAIQKVEIEEKRLFGTPRVALRITVSHPQDVPRIRERIRRVEGVDLILEHDILFVRRYLIDRGIKPLTWLRLEVEERDGRALLRGVEQLEEEPPELRVAAVAIAVYNPKGAPRSSKDEIIMISVATSDGVEKVLTWREVQGLEQVEVLQDEKEMLLRFAELIKEGDYDVIVGYNTDSFDFPYIRDRLKKLGISLPLGRLDAELEVSRRGALPEARIRGRAHVDLYPIVRRHVKLNSYDLESVVEELLGIKKEKLDGERLFTYWDEGGEKRALLARYALEAARVTLALAEKFLPLYCELSTIVGQSLNDVARMTSGQLVEWLLMRYATPRGELIPNHPAGEEYAARARATYAGGYVREPKRGLVEHIAVFDFRSFGPSIIVSHNIDPSTLIVGNCEENRAPELEYCFSLEREGFIPAILKELIRRRAEIKRELKRSEGDRRRTLSFAEKALKILANSFYGYMGYPRARWYRRECAESVAAFARMYIKQVMRIAEEEFKLEVVYGDTDSLFVVIPPEKRELAQKFLQKVNESMPGIIELEFEGFYRRGLFVTKKRYALLSEDGKMVVKGLEFVRRDWAPIARETQKEVLRILLEEADPEKAARLVRDVIERIRQRRVSLEDITIYTQLTKRIKSYKSLEPHVVAAQKLKERGREVAPGMIIGYIITKGTKGISQRATPVEFARLEDYDPEYYIDNQILPAIQRIFEAIGYTRDYLKEGITQTSLSRWF

SEQ ID NO: 2476 - protein, 791 aa, unidentified; identical to SEQ ID NO: 1802
  REGION 1..791: note = Description of Unknown: Synthetic polypeptide

SEQ ID NO: 2477 - protein, 792 aa, unidentified
  REGION 1..792: note = Description of Unknown: Synthetic polypeptide
MPRILKGFLIDADFETVEGRALIRLFLRGEEGSFVVYDDSFSPYFYALPGDEPERVKERILASGAAEAIQKVEIEEKRLFGTPRVALRITVSHPQDVPRIRERIRRVEGVDLILEHDILFVRRRLIDRGIKPLTWLRLEVEERDGRALLRGVEQLEEEPPELRVAAVAIAVYNPKGAPRSSKDEIIMISVATSDGVEKVLTWREVQGLEQVEVLQDEKEMLLRFAELIKEGDYDVIVGYNTDSFDFPYIRDRLKKLGISLPLGRLDAELEVSRRGALPEARIRGRAHVDLYPIVRRHVKLNSYVLESVVEELLGIKKEKLDGERLFTYWDEGGEKRALLARYALEDARVTLALAEKFLPLYCELSTIVGQSLNDVARMTSGQLVEWLLMRYATPRGELIPNHPAGEEYAARARATYAGGYVREPKRGLVEHIAVFDFRSIGPSIIVSHNIDPSTLIVGNCEENRAPELEYCFSLEREGFIPAILKELIRRRAEIKRELKRSEGDRRRTLSFAEKRLKILANSFYGYMGYPRARWYRRECAESVAAFARMYIKQVMRIAEEEFKLEVVYGDTDSLFVVIPPEKRELAQKFLQKVNESMPGIIELEFEGFYRRGLFVTKKRYALLSEDGKMVVKGLEFVRRDWAPIARETQKEVLRILLEEADPEKAARLVRDVIERIRQRRVSLEDITIYTQLTKRIKSYKSLEPHVVAAQKLKERGREVAPGMIIGYIITKGTKGISQRATPVEFARLEDYDPEYYIDNQILPAIQRIFEAIGYTRDYLKEGITQTSLSRWF

SEQ ID NO: 2478 - protein, 792 aa, unidentified
  REGION 1..792: note = Description of Unknown: Synthetic polypeptide
MPRILKGFLIDADFETVEGRALIRLFLRGEEGSFVVYDDSFSPYFYALPGDEPERVKERILASGAAEAIQKVEIEEKRLFGTPRVALRITVSHPQDVPRIRERIRRVEGVDLILEHDILFVRRRLIDRGIKPLTWLRLEVEERDGRALLRGVEQLEEEPPELRVAAVAIAVYNPKGAPRSSKDEIIMISVATSDGVEKVLTWREVQGLEQVEVLQDEKEMLLRFAELIKEGDYDVIVGYNTDSFDFPYIRDRLKKLGISLPLGRLDAELEVSRRGALPEARIRGRAHVDLYPIVRRHVKLNSYDLESVVEELLGIKKEKLDGERLFTYWDEGGEKRALLARYALEDARVTLALAEKFLPLYCELSTIVGQSLNDVARMTSGQLVEWLLMRYATPRGELIPNHPAGEEYAARARATYAGGYVREPKRGLVEHIAVFDFRSFGPSIIVSHNIDPSTLIVGNCEENRAPELEYCFSLEREGFIPAILKELIRRRAEIKRELKRSEGDRRRTLSFAEKALKILANSFYGYMGYPRARWYRRECAESVAAFARMYIKQVMRIAEEEFKLEVVYGDTDSLFVVIPPEKRELAQKFLQKVNESMPGIIELEFEGFYRRGLFVTKKRYALLSEDGKMVVKGLEFVRRDWAPIARETQKEVLRILLEEADPEKAARLVRDVIERIRQRRVSLEDIVIYTQLTKRIKSYKSLEPHVVAAQKLKERGREVAPGMIIGYIITKGTKGISQRATPVEFARLEDYDPEYYIDNQILPAIQRIFEAIGYTRDYLKEGITQTSLSRWF

SEQ ID NO: 2479 - protein, 792 aa, unidentified
  REGION 1..792: note = Description of Unknown: Synthetic polypeptide
MPRILKGFLIDADFETVEGRALIRLFLRGEEGSFVVYDDSFSPYFYALPGDEPERVKERILASGAAEAIQKVEIEEKRLFGTPRVALRITVSHPQDVPRIRERIRRVEGVDLILEHDILFVRRYLIDRGIKPLTWLRLEVEERDGRALLRGVEQLEEEPPELRVAAVAIAVYNPKGAPRSSKDEIIMISVATSDGVEKVLTWREVQGLEQVEVLQDEKEMLLRFAELIKEGDYDVIVGYNTDSFDFPYIRDRLKKLGISLPLGRLDAELEVSRRGALPEARIRGRAHVDLYPIVRRHVKLNSYHLESVVEELLGIKKEKLDGERLFTYWDEGGEKRALLARYALEDARVTLALAEKFLPLYCELSTIVGQSLNDVARMTSGQLVEWLLMRYATPRGELIPNHPAGEEYAARARATYAGGYVREPKRGLVEHIAVFDFRSFGPSIIVSHNIDPSTLIVGNCEENRAPELEYCFSLEREGFIPAILKELIRRRAEIKRELKRSEGDRRRTLSFAEKALKILANSFYGYMGYPRARWYRRECAESVAAFARMYIKQVMRIAEEEFKLEVVYGDTDSLFVVIPPEKRELAQKFLQKVNESMPGIIELEFEGFYRRGLFVTKKRYALLSEDGKMVVKGLEFVRRDWAPIARETQKEVLRILLEEADPEKAARLVRDVIERIRQRRVSLEDITIYTQLTKRIKSYKSLEPHVVAAQKLKERGREVAPGMIIGYIITKGTKGISQRATPVEFARLEDYDPEYYIDNQILPAIQRIFEAIGYTRDYLKEGITQTSLSRWF

SEQ ID NO: 2480 - protein, 792 aa, unidentified
  REGION 1..792: note = Description of Unknown: Synthetic polypeptide
MPRILKGFLIDADFETVEGRALIRLFLRGEEGSFVVYDDSFSPYFYALPGDEPERVKERILASGAAEAIQKVEIEEKRLFGTPRVALRITVSHPQDVPRIRERIRRVEGVDLILEHDILFVRRRLIDRGIKPLTWLRLEVEERDGRALLRGVEQLEEEPPELRVAAVAIAVYNPKGAPRSSKDEIIMISVATSDGVEKVLTWREVQGLEQVEVLQDEKEMLLRFAELIKEGDYDVIVGYNTDSFDFPYIRDRLKKLGISLPLGRLDAELEVSRRGALPEARIRGRAHVDLYPIVRRHVKLNSYDLESVVEELLGIKKEKLDGERLFTYWDEGGEKRALLARYALEDARVTLALAEKFLPLYCELSTIVGQSLNDVARMTSGQLVEWLLMRYATPRGELIPNHPAGEEYAARARATYAGGYVREPKRGLVEHIAVFDFRSFGPSIIVSHNIDPSTLIVGNCEENRAPELEYCFSLEREGFIPAILKELIRRRAEIKRELKRSEGDRRRTLSFAEKALKILANSFYGYMGYPRARWYRRECAESVAAFARMYIKQVMRIIEEEFKLEVVYGDTDSLFVVIPPEKRELAQKFLQKVNESMPGIIELEFEGFYRRGLFVTKKRYALLSEDGKMVVKGLEFVRRDWAPIARETQKEVLRILLEEADPEKAARLVRDVIERIRQRRVSLEDITIYTQLTKRIKSYKSLEPHVVAAQKLKERGREVAPGMIIGYIITKGTKGISQRATPVEFARLEDYDPEYYIDNQILPAIQRIFEAIGYTRDYLKEGITQTSLSRWF

SEQ ID NO: 2481 - protein, 792 aa, unidentified
  REGION 1..792: note = Description of Unknown: Synthetic polypeptide
MPRILKGFLIDADFETVEGRALIRLFLRGEEGSFVVYDDSFSPYFYALPGDEPERVKERILASGAAEAIQKVEIEEKRLFGTPRVALRITVSHPQDVPRIRERIRRVEGVDLILEHDILFVRRRLIDRGIKPLTWLRLEVEERDGRALLRGVEQLEEEPPELRVAAVAIAVYNPKGAPRSSKDEIIMISVATSDGVEKVLTWREVQGLEQVEVLQDEKEMLLRFAELIKEGDYDVIVGYNTDSFDFPYIRDRLKKLGISLPLGRLDAELEVSRRGALPEARIRGRAHVDLYPIVRRHVKLNSYDLESVVEELLGIKKEKLDGERLFTYWDEGGEKRALLARYALEDARVTLALAEKFLPLYCELSTIVGQSLNDVARMTSGQLVEWYLMRYATPRGELIPNHPAGEEYAARARATYAGGYVREPKRGLVEHIAVFDFRSFGPSIIVSHNIDPSTLIVGNCEENRAPELEYCFSLEREGFIPAILKELIRRRAEIKRELKRSEGDRRRTLSFAEKALKILANSFYGYMGYPRARWYRRECAESVAAFARMYIKQVMRIAEEEFKLEVVYGDTDSLFVVIPPEKRELAQKFLQKVNESMPGIIELEFEGFYRRGLFVTKKRYALLSEDGKMVVKGLEFVRRDWAPIARETQKEVLRILLEEADPEKAARLVRDVIERIRQRRVSLEDITIYTQLTKRIKSYKSLEPHVVAAQKLKERGREVAPGMIIGYIITKGTKGISQRATPVEFARLEDYDPEYYIDNQILPAIQRIFEAIGYTRDYLKEGITQTSLSRWF

SEQ ID NO: 2482 - protein, 792 aa, unidentified
  REGION 1..792: note = Description of Unknown: Synthetic polypeptide
MPRILKGFLIDADFETVEGRALIRLFLRGEEGSFVVYDDSFSPYFYALPGDEPERVKERILASGAAEAIQKVEIEEKRLFGTPRVALRITVSHPQDVPRIRERIRRVEGVDLILEHDILFVRRYLIDRGIKPLTWLRLEVEERDGRALLRGVEQLEEEPPELRVAAVAIAVYNPKGAPRSSKDEIIMISVATSDGVEKVLTWREVQGLEQVEVLQDEKEMLLRFAELIKEGDYDVIVGYNTDSFDFPYIRDRLKKLGISLPLGRLDAELEVSRRGALPEARIRGRAHVDLYPIVRRHVKLNSYQLESVVEELLGIKKEKLDGERLFTYWDEGGEKRALLARYALEDARVTLALAEKFLPLYCELSTIVGQSLNDVARMTSGQLVEWLLMRYATPRGELIPNHPAGEEYAARARATYAGGYVREPKRGLVEHIAVFDFRSFGPSIIVSHNIDPSTLIVGNCEENRAPELEYCFSLEREGFIPAILKELIRRRAEIKRELKRSEGDRRRTLSFAEKALKILANSFYGYMGYPRARWYRRECAESVAAFARMYIKQVMRIAEEEFKLEVVYGDTDSLFVVIPPEKRELAQKFLQKVNESMPGIIELEFEGFYRRGLFVTKKRYALLSEDGKMVVKGLEFVRRDWAPIARETQKEVLRILLEEADPEKAARLVRDVIERIRQRRVSLEDITIYTQLTKRIKSYKSLEPHVVAAQKLKERGREVAPGMIIGYIITKGTKGISQRATPVEFARLEDYDPEYYIDNQILPAIQRIFEAIGYTRDYLKEGITQTSLSRWF

SEQ ID NO: 2483 - protein, 791 aa, unidentified
  REGION 1..791: note = Description of Unknown: Synthetic polypeptide
MPRILKGFLIDADFETVEGRALIRLFLRGEEGSFVVYDDSFSPYFYALPGDEPERVKERILASGAAEAIQKVEIEEKRLFGTPRVALRITVSHPQDVPRIRERIRRVEGVDLILEHDILFVRRRLIDRGIKPLTWLRLEVEERDGRALLRGVEQLEEEPPELRVAAVAIAVYNPKGAPRSSKDEIIMISVATSDGVEKVLTWREVQGLEQVEVLQDEKEMLLRFAELIKEGDYDVIVGYNTDSFDFPYIRDRLKKLGISLPLGRLDAELEVSRRGALPEARIRGRAHVDLYPIVRRHVKLNSYDLESVVEELLGIKKEKLDGERLFTYWDEGGEKRALLARYALEDARVTLALAEKFLPLYCELSTIVGQSLNDVARMTSGQLVEWLLMRYATPRGELIPNHPAGEEYAARARATYAGGYVREPKRGLVEHIAVFDFRSFGPSIIVSHNIDPSTLIVGNCEENRAPELEYCFSLEREGFIPAILKELIRRRAEIKRELKRSEGDRRRTLSFAEKALKILANSFYGYMGYPRARWYRRECAESVAAFARMYIKQVMRIAEEEFKLEVVYGDTDSLFVVIPPEKRELAQKFLQKVNESMPGIIELEFEGFYRRGLFVTKKRYALLSEDGKMVVKGLEFVRRDWAPIARETQKEVLRILLEEADPEKAARLVRDVIERIRQRRVSLEDITIYTQLTKRIKSYKSLEPHVVAAQKLKERGREVAPGMIIGYIITKGTKGISQRATPVEFARLEDYDPEYYIDNQILPAIQRIFEAIGYTRDYLKEGITQTSLSRW

SEQ ID NO: 2484 - protein, 792 aa, unidentified
  REGION 1..792: note = Description of Unknown: Synthetic polypeptide
MPRILKGFLIDADFETVEGRALIRLFQRGEEGSFVVYDDSFSPYFYALPGDEPERVKERILASGAAEAIQKVEIEEKRLFGTPRVALRITVSHPQDVPRIRERIRRVEGVDLILEHDILFVRRRLIDRGIKPLTWLRLEVEERDGRALLRGVEQLEEEPPELRVAAVAIAVYNPKGAPRSSKDEIIMISVATSDGVEKVLTWREVQGLEQVEVLQDEKEMLLRFAELIKEGDYDVIVGYNTDSFDFPYIRDRLKKLGISLPLGRLDAELEVSRRGALPEARIRGRAHVDLYPIVRRHVKLNSYDLESVVEELLGIKKEKLDGERLFTYWDEGGEKRALLARYALEDARVTLALAEKFLPLYCELSTIVGQSLNDVARMTSGQLVEWLLMRYATPRGELIPNHPAGEEYAARARATYAGGYVREPKRGLVEHIAVFDFRSFGPSIIVSHNIDPSTLIVGNCEENRAPELEYCFSLEREGFIPAILKELIRRRAEIKRELKRSEGDRRRTLSFAEKALKILANSFYGYMGYPRARWYRRECAESVAAFARMYIKQVMRIAEEEFKLEVVYGDTDSLFVVIPPEKRELAQKFLQKVNESMPGIIELEFEGFYRRGLFVTKKRYALLSEDGKMVVKGLEFVRRDWAPIARETQKEVLRILLEEADPEKAARLVRDVIERIRQRRVSLEDITIYTQLTKRIKSYKSLEPHVVAAQKLKERGREVAPGMIIGYIITKGTKGISQRATPVEFARLEDYDPEYYIDNQILPAIQRIFEAIGYTRDYLKEGITQTSLSRWF

SEQ ID NO: 2485 - protein, 782 aa, unidentified
  REGION 1..782: note = Description of Unknown: Synthetic polypeptide
MPRILKGFLIDADFETVEGRALIRLFLRGEEGSFVVYDDSFSPYFYALPGDEPERVKERILASGAAEAIQKVEIEEKRLFGTPRVALRITVSHPQDVPRIRERIRRVEGVDLILEHDILFVRRYLIDRGIKPLTWLRLEVEERDGRALLRELRVAAVAIAVYNPKGAPRSSKDEIIMISVATSDGVEKVLTWREVQGLEQVEVLQDEKEMLLRFAELIKEGDYDVIVGYNTDSFDFPYIRDRLKKLGISLPLGRLDAELEVSRRGALPEARIRGRAHVDLYPIVRRHVKLNSYDLESVVEELLGIKKEKLDGERLFTYWDEGGEKRALLARYALEDARVTLALAEKFLPLYCELSTIVGQSLNDVARMTSGQLVEWLLMRYATPRGELIPNHPAGEEYAARARATYAGGYVREPKRGLVEHIAVFDFRSFGPSIIVSHNIDPSTLIVGNCEENRAPELEYCFSLEREGFIPAILKELIRRRAEIKRELKRSEGDRRRTLSFAEKALKILANSFYGYMGYPRARWYRRECAESVAAFARMYIKQVMRIAEEEFKLEVVYGDTDSLFVVIPPEKRELAQKFLQKVNESMPGIIELEFEGFYRRGLFVTKKRYALLSEDGKMVVKGLEFVRRDWAPIARETQKEVLRILLEEADPEKAARLVRDVIERIRQRRVSLEDITIYTQLTKRIKSYKSLEPHVVAAQKLKERGREVAPGMIIGYIITKGTKGISQRATPVEFARLEDYDPEYYIDNQILPAIQRIFEAIGYTRDYLKEGITQTSLSRWF

SEQ ID NO: 2486 - protein, 792 aa, unidentified
  REGION 1..792: note = Description of Unknown: Synthetic polypeptide
MPRILKGFLIDADFETVEGRALIRLFLRGEEGSFVVYDDSFSPYFYALPGDEPERVKERILASGAAEAIQKVEIEEKRLFGTPRVALRITVSHPQDVPRIRERIRRVEGVDLILEHDILFVRRRLIDRGIKPLTWLRLEVEERDGRALLRGVEQLEEEPPELRVAAVAIAVYNPKGAPRSSKDEIIMISVATSDGVEKVLTWREVQGLEQVEVLQDEKEMLLRFAELIKEGDYDVIVGYNTDSFDFPYIRDRLKKLGISLPLGRLDAELEVSRRGALPEARIRGRAHVDLYPIVRRHVKLNSYDLESVVEEVLGIKKEKLDGERLFTYWDEGGEKRALLARYALEDARVTLALAEKFLPLYCELSTIVGQSLNDVARMTSGQLVEWLLMRYATPRGELIPNHPAGEEYAARARATYAGGYVREPKRGLVEHIAVFDFRSFGPSIIVSHNIDPSTLIVGNCEENRAPELEYCFSLEREGFIPAILKELIRRRAEIKRELKRSEGDRRRTLSFAEKALKILANSFYGYMGYPRARWYRRECAESVAAFARMYIKQVMRIAEEEFKLEVVYGDTDSLFVVIPPEKRELAQKFLQKVNESMPGIIELEFEGFYRRGLFVTKKRYALLSEDGKMVVKGLEFVRRDWAPIARETQKEVLRILLEEADPEKAARLVRDVIERIRQRRVSLEDITIYTQLTKRIKSYKSLEPHVVAAQKLKERGREVAPGMIIGYIITKGTKGISQRATPVEFARLEDYDPEYYIDNQILPAIQRIFEAIGYTRDYLKEGITQTSLSRWF

SEQ ID NO: 2487 - protein, 792 aa, unidentified
  REGION 1..792: note = Description of Unknown: Synthetic polypeptide
MPRILKGFLIDADFETVEGRALIRLFLRGEEGSFVVYDDSFSPYFYALPGDEPERVKERILASGAAEAIQKVEIEEKRLFGTPRVALRITVSHPQDVPRIRERIRRVEGVDLILEHDILFVRRRLIDRGIKPLTWLRLEVEERDGRALLRGVEQLEEEPPELRVAAVAIAVYNPKGAPRSSKDEIIMISVATSDGVEKVLTWREVQGLEQVEVLQDEKEMLLRFAELIKEGDYDVIVGYNTDSFDFPYIRDRLKKLGISLPLGRLDAELEVSRRGALPEARIRGRAHVDLYPVVRRHVKLNSYDLESVVEELLGIKKEKLDGERLFTYWDEGGEKRALLARYALEDARVTLALAEKFLPLYCELSTIVGQSLNDVARMTSGQLVEWLLMRYATPRGELIPNHPAGEEYAARARATYAGGYVREPKRGLVEHIAVFDFRSFGPSIIVSHNIDPSTLIVGNCEENRAPELEYCFSLEREGFIPAILKELIRRRAEIKRELKRSEGDRRRTLSFAEKALKILANSFYGYMGYPRARWYRRECAESVAAFARMYIKQVMRIAEEEFKLEVVYGDTDSLFVVIPPEKRELAQKFLQKVNESMPGIIELEFEGFYRRGLFVTKKRYALLSEDGKMVVKGLEFVRRDWAPIARETQKEVLRILLEEADPEKAARLVRDVIERIRQRRVSLEDITIYTQLTKRIKSYKSLEPHVVAAQKLKERGREVAPGMIIGYIITKGTKGISQRATPVEFARLEDYDPEYYIDNQILPAIQRIFEAIGYTRDYLKEGITQTSLSRWF

SEQ ID NO: 2488 - protein, 792 aa, unidentified
  REGION 1..792: note = Description of Unknown: Synthetic polypeptide
MPRILKGFLIDADFETVEGRALIRLFLRGEEGSFVVYDDSFSPYFYALPGDEPERVKERILASGAAEAIQKVEIEEKRLFGTPRVALRITVSHPQDVPRIRERIRRVEGVDLILEHDILFVRRRLIDRGIKPLTWLRLEVEERDGRALLRGVEQLEEEPPELRVAAVAIAVYNPKGAPRSSKDEIIMISVATSDGVEKVLTWREVQGLEQVEVLQDEKEMLLRFAELIKEGDYDVIVGYNTDSFDFPYIRDRLKKLGISLPLGRLDAELEVSRRGALPEARIRGRAHVDLYPIVRRHVKLNSYDLESVVEELLGIKKEKLDGERLFTYWDEGGEKRALLARYALEDARVTLALAEKFLPMYCELSTIVGQSLNDVARMTSGQLVEWLLMRYATPRGELIPNHPAGEEYAARARATYAGGYVREPKRGLVEHIAVFDFRSFGPSIIVSHNIDPSTLIVGNCEENRAPELEYCFSLEREGFIPAILKELIRRRAEIKRELKRSEGDRRRTLSFAEKALKILANSFYGYMGYPRARWYRRECAESVAAFARMYIKQVMRIAEEEFKLEVVYGDTDSLFVVIPPEKRELAQKFLQKVNESMPGIIELEFEGFYRRGLFVTKKRYALLSEDGKMVVKGLEFVRRDWAPIARETQKEVLRILLEEADPEKAARLVRDVIERIRQRRVSLEDITIYTQLTKRIKSYKSLEPHVVAAQKLKERGREVAPGMIIGYIITKGTKGISQRATPVEFARLEDYDPEYYIDNQILPAIQRIFEAIGYTRDYLKEGITQTSLSRWF

SEQ ID NO: 2489 - protein, 792 aa, unidentified
  REGION 1..792: note = Description of Unknown: Synthetic polypeptide
MPRILKGFLIDADFETVEGRALIRLFLRGEEGSFVVYDDSFSPYFYALPGDEPERVKERILASGAAEAIQKVEIEEKRLFGTPRVALRITVSHPQDVPRIRERIRRVEGVDLILEHDILFVRRYLIDRGIKPLTWLRLEVEERDGRALLRGVEQLEEEPPELRVAAVAIAVYNPKGAPRSSKDEIIMISVATSDGVEKVLTWREVQGLEQVEVLQDEKEMLLRFAELIKEGDYDVIVGYNTDSFDFPYIRDRLKKLGISLPLGRLDAELEVSRRGALPEARIRGRAHVDLYPIVRRHVKLNSYTLESVVEELLGIKKEKLDGERLFTYWDEGGEKRALLARYALEDARVTLALAEKFLPLYCELSTIVGQSLNDVARMTSGQLVEWLLMRYATPRGELIPNHPAGEEYAARARATYAGGYVREPKRGLVEHIAVFDFRSFGPSIIVSHNIDPSTLIVGNCEENRAPELEYCFSLEREGFIPAILKELIRRRAEIKRELKRSEGDRRRTLSFAEKALKILANSFYGYMGYPRARWYRRECAESVAAFARMYIKQVMRIAEEEFKLEVVYGDTDSLFVVIPPEKRELAQKFLQKVNESMPGIIELEFEGFYRRGLFVTKKRYALLSEDGKMVVKGLEFVRRDWAPIARETQKEVLRILLEEADPEKAARLVRDVIERIRQRRVSLEDITIYTQLTKRIKSYKSLEPHVVAAQKLKERGREVAPGMIIGYIITKGTKGISQRATPVEFARLEDYDPEYYIDNQILPAIQRIFEAIGYTRDYLKEGITQTSLSRWF

SEQ ID NO: 2490 - protein, 792 aa, unidentified
  REGION 1..792: note = Description of Unknown: Synthetic polypeptide
MPRILKGFLIDADFETVEGRALIRLFLRGEEGSFVVYDDSFSPYFYALPGDEPERVKERILASGAAEAIQKVEIEEKRLFGTPRVALRITVSHPQDVPRIRERIRRVEGVDLILEHDILFVRRYLIDRGIKPLTWLRLEVEERDGRALLRGVEQLEEEPPELRVAAVAIAVYNPKGAPRSSKDEIIMISVATSDGVEKVLTWREVQGLEQVEVLQDEKEMLLRFAELIKEGDYDVIVGYNTDSFDFPYIRDRLKKLGISLPLGRLDAELEVSRRGALPEARIRGRAHVDLYPIVRRHVKLNSYELESVVEELLGIKKEKLDGERLFTYWDEGGEKRALLARYALEDARVTLALAEKFLPLYCELSTIVGQSLNDVARMTSGQLVEWLLMRYATPRGELIPNHPAGEEYAARARATYAGGYVREPKRGLVEHIAVFDFRSFGPSIIVSHNIDPSTLIVGNCEENRAPELEYCFSLEREGFIPAILKELIRRRAEIKRELKRSEGDRRRTLSFAEKALKILANSFYGYMGYPRARWYRRECAESVAAFARMYIKQVMRIAEEEFKLEVVYGDTDSLFVVIPPEKRELAQKFLQKVNESMPGIIELEFEGFYRRGLFVTKKRYALLSEDGKMVVKGLEFVRRDWAPIARETQKEVLRILLEEADPEKAARLVRDVIERIRQRRVSLEDITIYTQLTKRIKSYKSLEPHVVAAQKLKERGREVAPGMIIGYIITKGTKGISQRATPVEFARLEDYDPEYYIDNQILPAIQRIFEAIGYTRDYLKEGITQTSLSRWF

SEQ ID NO: 2491 - protein, 792 aa, unidentified
  REGION 1..792: note = Description of Unknown: Synthetic polypeptide
MPRILKGFLIDADFETVEGRALIRLFLRGEEGSFVVYDDSFSPYFYALPGDEPERVKERILASGAAEAIQKVEIENKRLFGTPRVALRITVSHPQDVPRIRERIRRVEGVDLILEHDILFVRRRLIDRGIKPLTWLRLEVEERDGRALLRGVEQLEEEPPELRVAAVAIAVYNPKGAPRSSKDEIIMISVATSDGVEKVLTWREVQGLEQVEVLQDEKEMLLRFAELIKEGDYDVIVGYNTDSFDFPYIRDRLKKLGISLPLGRLDAELEVSRRGALPEARIRGRAHVDLYPIVRRHVKLNSYDLESVVEELLGIKKEKLDGERLFTYWDEGGEKRALLARYALEDARVTLALAEKFLPLYCELSTIVGQSLNDVARMTSGQLVEWLLMRYATPRGELIPNHPAGEEYAARARATYAGGYVREPKRGLVEHIAVFDFRSFGPSIIVSHNIDPSTLIVGNCEENRAPELEYCFSLEREGFIPAILKELIRRRAEIKRELKRSEGDRRRTLSFAEKALKILANSFYGYMGYPRARWYRRECAESVAAFARMYIKQVMRIAEEEFKLEVVYGDTDSLFVVIPPEKRELAQKFLQKVNESMPGIIELEFEGFYRRGLFVTKKRYALLSEDGKMVVKGLEFVRRDWAPIARETQKEVLRILLEEADPEKAARLVRDVIERIRQRRVSLEDITIYTQLTKRIKSYKSLEPHVVAAQKLKERGREVAPGMIIGYIITKGTKGISQRATPVEFARLEDYDPEYYIDNQILPAIQRIFEAIGYTRDYLKEGITQTSLSRWF

SEQ ID NO: 2492 - protein, 780 aa, unidentified
  REGION 1..780: note = Description of Unknown: Synthetic polypeptide
MPRILKGFLIDADFETVEGRALIRLFLRGEEGSFVVYDDSFSPYFYALPGDEPERVKERILASGAAEAIQKVEIEEKRLFGTPRVALRITVSHPQDVPRIRERIRRVEGVDLILEHDILFVRRYLIDRGIKPLTWLLRGVEQLEEEPPELRVAAVAIAVYNPKGAPRSSKDEIIMISVATSDGVEKVLTWREVQGLEQVEVLQDEKEMLLRFAELIKEGDYDVIVGYNTDSFDFPYIRDRLKKLGISLPLGRLDAELEVSRRGALPEARIRGRAHVDLYPIVRRHVKLNSYDLESVVEELLGIKKEKLDGERLFTYWDEGGEKRALLARYALEDARVTLALAEKFLPLYCELSTIVGQSLNDVARMTSGQLVEWLLMRYATPRGELIPNHPAGEEYAARARATYAGGYVREPKRGLVEHIAVFDFRSFGPSIIVSHNIDPSTLIVGNCEENRAPELEYCFSLEREGFIPAILKELIRRRAEIKRELKRSEGDRRRTLSFAEKALKILANSFYGYMGYPRARWYRRECAESVAAFARMYIKQVMRIAEEEFKLEVVYGDTDSLFVVIPPEKRELAQKFLQKVNESMPGIIELEFEGFYRRGLFVTKKRYALLSEDGKMVVKGLEFVRRDWAPIARETQKEVLRILLEEADPEKAARLVRDVIERIRQRRVSLEDITIYTQLTKRIKSYKSLEPHVVAAQKLKERGREVAPGMIIGYIITKGTKGISQRATPVEFARLEDYDPEYYIDNQILPAIQRIFEAIGYTRDYLKEGITQTSLSRWF

SEQ ID NO: 2493 - protein, 792 aa, unidentified
  REGION 1..792: note = Description of Unknown: Synthetic polypeptide
MPRILKGFLIDADFETVEGRALIRLFLRGEEGSFVVYDDSFSPYFYALPGDEPERVKERILASGAAEAIQKVEIEEKRLFGTPRVALRITVSHPQDVPRIRERIRRVEGVDLILEHDILFVRRYLIDRGIKPLTWLRLEVEERDGRALLRGVEQLEEEPPELRVAAVAIAVYNPKGAPRSSKDEIIMISVATSDGVEKVLTWREVQGLEQVEVLQDEKEMLLRFAELIKEGDYDVIVGYNTDSFDFPYIRDRLKKLGISLPLGRLDAELEVSRRGALPEARIRGRAHVDLYPIVRRHVKLNSYYLESVVEELLGIKKEKLDGERLFTYWDEGGEKRALLARYALEDARVTLALAEKFLPLYCELSTIVGQSLNDVARMTSGQLVEWLLMRYATPRGELIPNHPAGEEYAARARATYAGGYVREPKRGLVEHIAVFDFRSFGPSIIVSHNIDPSTLIVGNCEENRAPELEYCFSLEREGFIPAILKELIRRRAEIKRELKRSEGDRRRTLSFAEKALKILANSFYGYMGYPRARWYRRECAESVAAFARMYIKQVMRIAEEEFKLEVVYGDTDSLFVVIPPEKRELAQKFLQKVNESMPGIIELEFEGFYRRGLFVTKKRYALLSEDGKMVVKGLEFVRRDWAPIARETQKEVLRILLEEADPEKAARLVRDVIERIRQRRVSLEDITIYTQLTKRIKSYKSLEPHVVAAQKLKERGREVAPGMIIGYIITKGTKGISQRATPVEFARLEDYDPEYYIDNQILPAIQRIFEAIGYTRDYLKEGITQTSLSRWF

SEQ ID NO: 2494 - protein, 792 aa, unidentified
  REGION 1..792: note = Description of Unknown: Synthetic polypeptide
MPRILKGFLIDADFETVEGRALIRLFLRGEEGSFVVYDDSFSPYFYALPGDEPERVKERILASGAAEAIQKVEIEEKRLFGTPRVALRITVSHPQDVPRIRERIRRVEGVDLILEHDILFVRRRLIDRGIKPLTWLRLEVEERDGRALLRGVEQLEEEPPELRVAAVAIAVYNPKGAPRSSKDEIIMISVATSDGVEKVLTWREVQGLEQVEVLQDEKEMLLRFAELIKEGDYDVIVGYNTDSFDFPYIRDRLKKLGISLPLGRLDAELEVSRRGALPEARIRGRAHVDLYPIVRRHVKLNSYDLESVVEELLGIKKEKLDGERLFTYWDEGGEKRALLARYALEDARVTLALAEKFLPLYCELSTIVGQSLNDVARMTSGQLVEWLLMRYATPRGELIPNHPAGEEYAARARATYAGGYVREPKRGLVEHIAVFDFRSFGPSIIVSHNIDPSTLIVGNCEENRAPELEYCFSLEREGFIPAILKELIRRRAEIKRELKRSEGDRRRTLSFAEKALKILANSFYGYMGYPRARWYRRECAESVAAFGRMYIKQVMRIAEEEFKLEVVYGDTDSLFVVIPPEKRELAQKFLQKVNESMPGIIELEFEGFYRRGLFVTKKRYALLSEDGKMVVKGLEFVRRDWAPIARETQKEVLRILLEEADPEKAARLVRDVIERIRQRRVSLEDITIYTQLTKRIKSYKSLEPHVVAAQKLKERGREVAPGMIIGYIITKGTKGISQRATPVEFARLEDYDPEYYIDNQILPAIQRIFEAIGYTRDYLKEGITQTSLSRWF

SEQ ID NO: 2495 - protein, 792 aa, unidentified
  REGION 1..792: note = Description of Unknown: Synthetic polypeptide
MPRILKGFLIDADFETVEGRALIRLFLRGEEGSFVVYDDSFSPYFYALPGDEPERVKERILASGAAEAIQKVEIEEKRLFGTPRVALRITVSHPQDVPRIRERIRRVEGVDLILEHDILFVRRRLIDRGIKPLTWLRLEVEERDGRALLRGVEQLEEEPPELRVAAVAIAVYNPKGAPRSSKDEIIMISVATSDGVEKVLTWREVQGLEQVEVLQDEKEMLLRFAELIKEGDYDVIVGYNTDSFDFPYIRDRLKKLGISLPLGRLDAELEVSRRGALPEARIRGRAHVDLYPIVRRHVKLNSYDLESVVEELLGIKKEKLDGERLATYWDEGGEKRALLARYALEDARVTLALAEKFLPLYCELSTIVGQSLNDVARMTSGQLVEWLLMRYATPRGELIPNHPAGEEYAARARATYAGGYVREPKRGLVEHIAVFDFRSFGPSIIVSHNIDPSTLIVGNCEENRAPELEYCFSLEREGFIPAILKELIRRRAEIKRELKRSEGDRRRTLSFAEKALKILANSFYGYMGYPRARWYRRECAESVAAFARMYIKQVMRIAEEEFKLEVVYGDTDSLFVVIPPEKRELAQKFLQKVNESMPGIIELEFEGFYRRGLFVTKKRYALLSEDGKMVVKGLEFVRRDWAPIARETQKEVLRILLEEADPEKAARLVRDVIERIRQRRVSLEDITIYTQLTKRIKSYKSLEPHVVAAQKLKERGREVAPGMIIGYIITKGTKGISQRATPVEFARLEDYDPEYYIDNQILPAIQRIFEAIGYTRDYLKEGITQTSLSRWF

SEQ ID NO: 2496 - protein, 792 aa, unidentified
  REGION 1..792: note = Description of Unknown: Synthetic polypeptide
MPRILKGFLIDADFETVEGRALIRLFLRGEEGSFVVYDDSFSPYFYALPGDEPERVKERILASGAAEAIQKVEIEEKRLFGTPRVALRITVSHPQDVPRIRERIRRVEGVDLILEHDILFVRRRLIDRGIKPLTWLRLEVEERDGRALLRGVEQLEEEPPELRVAAVAIAVYNPKGAPRSSKDEIIMISVATSDGVEKVLTWREVQGLEQVEVLQDEKEMLLRFAELIKEGDYDVIVGYNTDSFDFPYIRDRLKKLGISLPLGRLDAELEVSRRGALPEARIRGRAHVDLYPIVRRHVKLNSYDLESVVEELLGIKKEKLDGERLFTYWDEGGEKRALLARYALEDARVTLALAEKFLPLYCELSTIVGQSLNDVARMTSGQLVEWLLMRYATPRGELIPNHPAGEEYAARARATYAGGYVREPKRGLVEHIAVFDFRSFGPSIIVSHNIDPSTLIVGNCEENRAPELEYCFSLEREGFIPAILKELIRRRAEIKRELKRSEGDRRRTLSFAEKALKILANSFYGYMGYPRARWYRRECAESVAAFARMYIKQVMRIAEEEFKLEVVYGDTDSLFVVIPPEKRELAQKFLQKVNESMPGIIELEFEGYYRRGLFVTKKRYALLSEDGKMVVKGLEFVRRDWAPIARETQKEVLRILLEEADPEKAARLVRDVIERIRQRRVSLEDITIYTQLTKRIKSYKSLEPHVVAAQKLKERGREVAPGMIIGYIITKGTKGISQRATPVEFARLEDYDPEYYIDNQILPAIQRIFEAIGYTRDYLKEGITQTSLSRWF

SEQ ID NO: 2497 - protein, 792 aa, unidentified
  REGION 1..792: note = Description of Unknown: Synthetic polypeptide
MPRILKGFLIDADFETVEGRALIRLFLRGEEGSFVVYDDSFSPYFYALPGDEPERVKERILASGAAEAIQKVEIEEKRLFGTPRVALRITVSHPQDVPRIRERIRRVEGVDLILEHDILFVRRRLIDRGIKPLTWLRLEVEERDGRALLRGVEQLEEEPPELRVAAVAIAVYNPKGAPRSSKDEIIMISVATSDGVEKVLTWREVQGLEQVEVLQDEKEMLLRFAELIKEGDYDVIVGYNTDSFDFPYIRDRLKKLGISLPLGRLDAELEVSRRGALPEARIRGRAHVDLYPIVRRHVKLNSYDLESVVEELLGIKKEKLDGERLFTYWDEGGEKRALLARYALEDARVTLALAEKFLPLYCELSTIVGQSLNDVARMTSGQLVEWLLMRYATPRGELIPNHPAGEEYAARARATYAGGYVREPKRGLVEHIAVFDFRSFGPSIIVSHNIDPSTLIVGNCEENRAPELEYCFSLEREGFIPAILKELIRRRAEIKRELKRSEGDRRRTLSFAEKALKILANSFYGYMGYPRARWYRRECAESVAAFARMYIKQVMRIAEEEFKLEVVYGDTDSLFVVIPPEKRELAQKFLQKVNESMPGIIELEFEGFYRRGLFVTKKRYALLSEDGKMVVKGLEFVRRDWAPIARETQKEVLRILLEEADPEKAARLVRNVIERIRQRRVSLEDITIYTQLTKRIKSYKSLEPHVVAAQKLKERGREVAPGMIIGYIITKGTKGISQRATPVEFARLEDYDPEYYIDNQILPAIQRIFEAIGYTRDYLKEGITQTSLSRWF

SEQ ID NO: 2498 - protein, 792 aa, unidentified
  REGION 1..792: note = Description of Unknown: Synthetic polypeptide
MPRILKGFLIDADFETVEGRALIRLFLRGEEGSFVVYDDSFSPYFYALPGDEPERVKERILASGAAEAIQKVEIEEKRLFGTPRVALRITVSHPQDVPRIRERIRRVEGVDLILEHDILFVRRRLIDRGIKPLTWLRLEVEERDGRALLRGVEQLEEEPPELRVAAVYIAVYNPKGAPRSSKDEIIMISVATSDGVEKVLTWREVQGLEQVEVLQDEKEMLLRFAELIKEGDYDVIVGYNTDSFDFPYIRDRLKKLGISLPLGRLDAELEVSRRGALPEARIRGRAHVDLYPIVRRHVKLNSYDLESVVEELLGIKKEKLDGERLFTYWDEGGEKRALLARYALEDARVTLALAEKFLPLYCELSTIVGQSLNDVARMTSGQLVEWLLMRYATPRGELIPNHPAGEEYAARARATYAGGYVREPKRGLVEHIAVFDFRSFGPSIIVSHNIDPSTLIVGNCEENRAPELEYCFSLEREGFIPAILKELIRRRAEIKRELKRSEGDRRRTLSFAEKALKILANSFYGYMGYPRARWYRRECAESVAAFARMYIKQVMRIAEEEFKLEVVYGDTDSLFVVIPPEKRELAQKFLQKVNESMPGIIELEFEGFYRRGLFVTKKRYALLSEDGKMVVKGLEFVRRDWAPIARETQKEVLRILLEEADPEKAARLVRDVIERIRQRRVSLEDITIYTQLTKRIKSYKSLEPHVVAAQKLKERGREVAPGMIIGYIITKGTKGISQRATPVEFARLEDYDPEYYIDNQILPAIQRIFEAIGYTRDYLKEGITQTSLSRWF

SEQ ID NO: 2499 - protein, 792 aa, unidentified
  REGION 1..792: note = Description of Unknown: Synthetic polypeptide
MPRILKGFLIDADFETVEGRALIRLFLRGEEGSFVVYDDSFSPYFYALPGDEPERVKERILASGAAEAIQKVEIEEKRLFGTPRVALRITVSHPQDVPRIRERIRRVEGVDLILEHDILFVRRYLIDRGIKPLTWLRLEVEERDGRALLRGVEQLEEEPPELRVAAVAIAVYNPKGAPRSSKDEIIMISVATSDGVEKVLTWREVQGLEQVEVLQDEKEMLLRFAELIKEGDYDVIVGYNTDSFDFPYIRDRLKKLGISLPLGRLDAELEVSRRGALPEARIRGRAHVDLYPIVRRHVKLNSYVLESVVEELLGIKKEKLDGERLFTYWDEGGEKRALLARYALEDARVTLALAEKFLPLYCELSTIVGQSLNDVARMTSGQLVEWLLMRYATPRGELIPNHPAGEEYAARARATYAGGYVREPKRGLVEHIAVFDFRSFGPSIIVSHNIDPSTLIVGNCEENRAPELEYCFSLEREGFIPAILKELIRRRAEIKRELKRSEGDRRRTLSFAEKALKILANSFYGYMGYPRARWYRRECAESVAAFARMYIKQVMRIAEEEFKLEVVYGDTDSLFVVIPPEKRELAQKFLQKVNESMPGIIELEFEGFYRRGLFVTKKRYALLSEDGKMVVKGLEFVRRRWAPIARETQKEVLRILLEEADPEKAARLVRDVIERIRQRRVSLEDITIYTQLTKRIKSYKRLEPHVVAAQKLKERGREVAPGMIIGYIITKGTKRISQRATPVEFARLEDYDPEYYIDNQILPAIQRIFEAIGYTRDYLKEGITQTSLSRWF

SEQ ID NO: 2500 - protein, 792 aa, unidentified
  REGION 1..792: note = Description of Unknown: Synthetic polypeptide
MPRILKGFLIDADFETVEGRALIRLFLRGEEGSFVVYDDSFSPYFYALPGDEPERVKERILASGAAEAIQKVEIEEKRLFGTPRVALRITVSHPQDVPRIRERIRRVEGVDLILEHDILFVRRRLIDRGIKPLTWLRLEVEERDGRALLRGVEQLEEEPPELRVAAVAIAVYNPKGAPRSSKDEIIMISVATSDGVEKVLTWREVQGLEQVEVLQDEKEMLLRFAELIKEGDYDVIVGYNTDSFDFPYIRDRLKKLGISLPLGRLDAELEVSRRNALPEARIRGRAHVDLYPIVRRHVKLNSYDLESVVEELLGIKKEKLDGERLFTYWDEGGEKRALLARYALEDARVTLALAEKFLPLYCELSTIVGQSLNDVARMTSGQLVEWLLMRYATPRGELIPNHPAGEEYAARARATYAGGYVREPKRGLVEHIAVFDFRSFGPSIIVSHNIDPSTLIVGNCEENRAPELEYCFSLEREGFIPAILKELIRRRAEIKRELKRSEGDRRRTLSFAEKALKILANSFYGYMGYPRARWYRRECAESVAAFARMYIKQVMRIAEEEFKLEVVYGDTDSLFVVIPPEKRELAQKFLQKVNESMPGIIELEFEGFYRRGLFVTKKRYALLSEDGKMVVKGLEFVRRDWAPIARETQKEVLRILLEEADPEKAARLVRDVIERIRQRRVSLEDITIYTQLTKRIKSYKSLEPHVVAAQKLKERGREVAPGMIIGYIITKGTKGISQRATPVEFARLEDYDPEYYIDNQILPAIQRIFEAIGYTRDYLKEGITQTSLSRWF

SEQ ID NO: 2501 - protein, 789 aa, unidentified
  REGION 1..789: note = Description of Unknown: Synthetic polypeptide
MPRILKGFLIDADFETVEGRALIRLFLRGEEGSFVVYDDSFSPYFYALPGDEPERVKERILASGAAEAIQKVEIEEKRLFGTPRVALRITVSHPQDVPRIRERIRRVEGVDLILEHDILFVRRYLIDRGIKPLTWLRLEVEERALLRGVEQLEEEPPELRVAAVAIAVYNPKGAPRSSKDEIIMISVATSDGVEKVLTWREVQGLEQVEVLQDEKEMLLRFAELIKEGDYDVIVGYNTDSFDFPYIRDRLKKLGISLPLGRLDAELEVSRRGALPEARIRGRAHVDLYPIVRRHVKLNSYDLESVVEELLGIKKEKLDGERLFTYWDEGGEKRALLARYALEDARVTLALAEKFLPLYCELSTIVGQSLNDVARMTSGQLVEWLLMRYATPRGELIPNHPAGEEYAARARATYAGGYVREPKRGLVEHIAVFDFRSFGPSIIVSHNIDPSTLIVGNCEENRAPELEYCFSLEREGFIPAILKELIRRRAEIKRELKRSEGDRRRTLSFAEKALKILANSFYGYMGYPRARWYRRECAESVAAFARMYIKQVMRIAEEEFKLEVVYGDTDSLFVVIPPEKRELAQKFLQKVNESMPGIIELEFEGFYRRGLFVTKKRYALLSEDGKMVVKGLEFVRRDWAPIARETQKEVLRILLEEADPEKAARLVRDVIERIRQRRVSLEDITIYTQLTKRIKSYKSLEPHVVAAQKLKERGREVAPGMIIGYIITKGTKGISQRATPVEFARLEDYDPEYYIDNQILPAIQRIFEAIGYTRDYLKEGITQTSLSRWF

SEQ ID NO: 2502 - protein, 792 aa, unidentified
  REGION 1..792: note = Description of Unknown: Synthetic polypeptide
MPRILKGFLIDADFETVEGRALIRLFLRGEEGSFVVYDDSFSPYFYALPGDEPERVKERILASGAAEAIQKVEIEEKRLFGTPRVALRITVSHPQDVPRIRERIRRVEGVDLILEHDILFVRRRLIDRGIKPLTWLRLEVEERDGRALLRGVEQLEEEPPELRVAAVAIAVYNPKGAPRSSKDEIIMISVATSDGVEKVLTWREVQGLEQVEVLQDEKEMLLRFAELIKEGDYDVIVGYNTDSFDFPYIRDRLKKLGISLPLGRLDAELEVSRRGALPEARIRGRAHVDLYPIVRRHVKLNSYDLESVVEELLGIKKEKLDGERLFTYWDEGGEKRALLARYAMEDARVTLALAEKFLPLYCELSTIVGQSLNDVARMTSGQLVEWLLMRYATPRGELIPNHPAGEEYAARARATYAGGYVREPKRGLVEHIAVFDFRSFGPSIIVSHNIDPSTLIVGNCEENRAPELEYCFSLEREGFIPAILKELIRRRAEIKRELKRSEGDRRRTLSFAEKALKILANSFYGYMGYPRARWYRRECAESVAAFARMYIKQVMRIAEEEFKLEVVYGDTDSLFVVIPPEKRELAQKFLQKVNESMPGIIELEFEGFYRRGLFVTKKRYALLSEDGKMVVKGLEFVRRDWAPIARETQKEVLRILLEEADPEKAARLVRDVIERIRQRRVSLEDITIYTQLTKRIKSYKSLEPHVVAAQKLKERGREVAPGMIIGYIITKGTKGISQRATPVEFARLEDYDPEYYIDNQILPAIQRIFEAIGYTRDYLKEGITQTSLSRWF

SEQ ID NO: 2503 - protein, 792 aa, unidentified; identical to SEQ ID NO: 2399
  REGION 1..792: note = Description of Unknown: Synthetic polypeptide

SEQ ID NO: 2504 - protein, 792 aa, unidentified
  REGION 1..792: note = Description of Unknown: Synthetic polypeptide
MPRILKGFLIDADFETVEGRALIRLFLRGEEGSFVVYDDSFSPYFYALLGDEPERVKERILASGAAEAIQKVEIEEKRLFGTPRVALRITVSHPQDVPRIRERIRRVEGVDLILEHDILFVRRRLIDRGIKPLTWLRLEVEERDGRALLRGVEQLEEEPPELRVAAVAIAVYNPKGAPRSSKDEIIMISVATSDGVEKVLTWREVQGLEQVEVLQDEKEMLLRFAELIKEGDYDVIVGYNTDSFDFPYIRDRLKKLGISLPLGRLDAELEVSRRGALPEARIRGRAHVDLYPIVRRHVKLNSYDLESVVEELLGIKKEKLDGERLFTYWDEGGEKRALLARYALEDARVTLALAEKFLPLYCELSTIVGQSLNDVARMTSGQLVEWLLMRYATPRGELIPNHPAGEEYAARARATYAGGYVREPKRGLVEHIAVFDFRSFGPSIIVSHNIDPSTLIVGNCEENRAPELEYCFSLEREGFIPAILKELIRRRAEIKRELKRSEGDRRRTLSFAEKALKILANSFYGYMGYPRARWYRRECAESVAAFARMYIKQVMRIAEEEFKLEVVYGDTDSLFVVIPPEKRELAQKFLQKVNESMPGIIELEFEGFYRRGLFVTKKRYALLSEDGKMVVKGLEFVRRDWAPIARETQKEVLRILLEEADPEKAARLVRDVIERIRQRRVSLEDITIYTQLTKRIKSYKSLEPHVVAAQKLKERGREVAPGMIIGYIITKGTKGISQRATPVEFARLEDYDPEYYIDNQILPAIQRIFEAIGYTRDYLKEGITQTSLSRWF

SEQ ID NO: 2505 - protein, 787 aa, unidentified
  REGION 1..787: note = Description of Unknown: Synthetic polypeptide
MPRILKGFLIDADFETVEGRALIRLFLRGEEGSFVVYDDSFSPYFYALPGDEPERVKERILASGAAEAIQKVEIEEKRLFGTPRVALRITVSHPQDVPRIRERIRRVEGVDLILEHDILFVRRYLIDRGIKPLTWLRLEVEELLRGVEQLEEEPPELRVAAVAIAVYNPKGAPRSSKDEIIMISVATSDGVEKVLTWREVQGLEQVEVLQDEKEMLLRFAELIKEGDYDVIVGYNTDSFDFPYIRDRLKKLGISLPLGRLDAELEVSRRGALPEARIRGRAHVDLYPIVRRHVKLNSYDLESVVEELLGIKKEKLDGERLFTYWDEGGEKRALLARYALEDARVTLALAEKFLPLYCELSTIVGQSLNDVARMTSGQLVEWLLMRYATPRGELIPNHPAGEEYAARARATYAGGYVREPKRGLVEHIAVFDFRSFGPSIIVSHNIDPSTLIVGNCEENRAPELEYCFSLEREGFIPAILKELIRRRAEIKRELKRSEGDRRRTLSFAEKALKILANSFYGYMGYPRARWYRRECAESVAAFARMYIKQVMRIAEEEFKLEVVYGDTDSLFVVIPPEKRELAQKFLQKVNESMPGIIELEFEGFYRRGLFVTKKRYALLSEDGKMVVKGLEFVRRDWAPIARETQKEVLRILLEEADPEKAARLVRDVIERIRQRRVSLEDITIYTQLTKRIKSYKSLEPHVVAAQKLKERGREVAPGMIIGYIITKGTKGISQRATPVEFARLEDYDPEYYIDNQILPAIQRIFEAIGYTRDYLKEGITQTSLSRWF

SEQ ID NO: 2506 - protein, 792 aa, unidentified
  REGION 1..792: note = Description of Unknown: Synthetic polypeptide
MPRILKGFLIDADFETVEGRALIRLFLRGEEGSFVVYDDSFSPYFYALPGDEPERVKERILASGAAEAIQKVEIEEKRLFGTPRVALRITVSHPQDVPRIRERIRRVEGVDLILEHDILFVRRRLIDRGIKPLTWLRLEVEERDGRALLRGVEQLEEEPPELRVAAVAIAVYNPKGAPRSSKDEIIMISVATSDGVEKVLTWREVQGLEQVEVLQDEKEMLLRFAELIKEGDYDVIVGYNTDSFDFPYIRDRLKKLGISLPLGRLDAELEVSRRGALPEARIRGRAHVDLYPIVRRHVKLNSYDLESVVEELLGIKKEKLDGERLFTYWDEGGEKRALLARYALEDARVTLALAEKFLPLYCELSTIVGQSLNDVARMTSGQLVEWLLMRYATPRGELIPNHPAGEEYAARARATYAGGYVREPKRGLVEHIAVFDFRSFGPSIIVSHNIDPSTLIVGNCEENRAPELEYCFSLEREGFIPAILKELIRRRAEIKRELKRSEGDRRRTLSFAEKALKILANSFYGYMGYPRARWYRSECAESVAAFARMYIKQVMRIAEEEFKLEVVYGDTDSLFVVIPPEKRELAQKFLQKVNESMPGIIELEFEGFYRRGLFVTKKRYALLSEDGKMVVKGLEFVRRDWAPIARETQKEVLRILLEEADPEKAARLVRDVIERIRQRRVSLEDITIYTQLTKRIKSYKSLEPHVVAAQKLKERGREVAPGMIIGYIITKGTKGISQRATPVEFARLEDYDPEYYIDNQILPAIQRIFEAIGYTRDYLKEGITQTSLSRWF

SEQ ID NO: 2507 - protein, 792 aa, unidentified
  REGION 1..792: note = Description of Unknown: Synthetic polypeptide
MPRILKGFLIDADFETVEGRALIRLFLRGEEGSFVVYDDSFSPYFYALPGDEPERVKERILASGAAEAIQKVEIEEKRLFGTPRVALRITVSHPQDVPRIRERIRRVEGVDLILEHDILFVRRRLIDRGIKPLTWLRLEVEERDGRALLRGVEQLEEEPPELRVAAVAIAVYNPKGAPRSSKDEIIMISVATSDGVEKVLTWREVQGLEQVEVLQDEKEMLLRFAELIKEGDYDVIVGYNTDSFDFPYIRDRLKKLGISLPLGRLDAELEVSRRGALPEARIRGRAHVDLYPIVRRHVKLNTYDLESVVEELLGIKKEKLDGERLFTYWDEGGEKRALLARYALEDARVTLALAEKFLPLYCELSTIVGQSLNDVARMTSGQLVEWLLMRYATPRGELIPNHPAGEEYAARARATYAGGYVREPKRGLVEHIAVFDFRSFGPSIIVSHNIDPSTLIVGNCEENRAPELEYCFSLEREGFIPAILKELIRRRAEIKRELKRSEGDRRRTLSFAEKALKILANSFYGYMGYPRARWYRRECAESVAAFARMYIKQVMRIAEEEFKLEVVYGDTDSLFVVIPPEKRELAQKFLQKVNESMPGIIELEFEGFYRRGLFVTKKRYALLSEDGKMVVKGLEFVRRDWAPIARETQKEVLRILLEEADPEKAARLVRDVIERIRQRRVSLEDITIYTQLTKRIKSYKSLEPHVVAAQKLKERGREVAPGMIIGYIITKGTKGISQRATPVEFARLEDYDPEYYIDNQILPAIQRIFEAIGYTRDYLKEGITQTSLSRWF

SEQ ID NO: 2508 - protein, 792 aa, unidentified
  REGION 1..792: note = Description of Unknown: Synthetic polypeptide
MPRILKGFLIDADFETVEGRALIRLFLRGEEGSFVVYDDSFSPYFYALPGDEPERVKERILASGAAEAIQKVEIEEKRLFGTPRVALRITVSHPQDVPRIRERIRRVEGVDLILEHDILFVRRYLIDRGIKPLTWLRLEVEERDGRALLRGVEQLEEEPPELRVAAVAIAVYNPKGAPRSSKDEIIMISVATSDGVEKVLTWREVQGLEQVEVLQDEKEMLLRFAELIKEGDYDVIVGYNTDSFDFPYIRDRLKKLGISLPLGRLDAELEVSRRGALPEARIRGRAHVDLYPIVRRHVKLNSYDLESVVEELLGIKKEKLDGERLFTYWDEGGEKRALLARYALEDARVTLALAEKFLPLYCELSTIVGQSLNDVARMTSGQLVEWLLMRYATPRGELIPNHPAGEEYAARARATYAGGYVREPKRGLVEHIAVFDFRSFGPSIIVSHNIDPSTLIVGNCEENRAPELEYCFSLEREGFIPAILKELIRRRAEIKRELKRSEGDRRRTLSFAEKALKILANSFYGYMGYPRARWYRRECAESVAAFARMYIKQVMRIAEEEFKLEVVYGDTDSLFVVIPPEKRELAQKFLQKVNESMPGIIELEFEGFYRRGLFVTKKRYALLSEDGKMVVKGLEFVRRDWAPIARETQKEVLRILLEEADPEEAARLVRDVIERIRQRRVSLEDITIYTQLTKRIKSYKSLEPHVVAAQKLKERGREVAPGMIIGYIITKGTKGISQRATPVEFARLEDYDPEYYIDNQILPAIQRIFEAIGYTRDYLKEGITQTSLSRWF

SEQ ID NO: 2509 - protein, 784 aa, unidentified
  REGION 1..784: note = Description of Unknown: Synthetic polypeptide
MPRILKGFLIDADFETVEGRALIRLFLRGEEGSFVVYDDSFSPYFYALPGDEPERVKERILASGAAEAIQKVEIEEKRLFGTPRVALRITVSHPQDVPRIRERIRRVEGVDLILEHDILFVRRYLIDRGIKPLTWLRRALLRGVEQLEEEPPELRVAAVAIAVYNPKGAPRSSKDEIIMISVATSDGVEKVLTWREVQGLEQVEVLQDEKEMLLRFAELIKEGDYDVIVGYNTDSFDFPYIRDRLKKLGISLPLGRLDAELEVSRRGALPEARIRGRAHVDLYPIVRRHVKLNSYDLESVVEELLGIKKEKLDGERLFTYWDEGGEKRALLARYALEDARVTLALAEKFLPLYCELSTIVGQSLNDVARMTSGQLVEWLLMRYATPRGELIPNHPAGEEYAARARATYAGGYVREPKRGLVEHIAVFDFRSFGPSIIVSHNIDPSTLIVGNCEENRAPELEYCFSLEREGFIPAILKELIRRRAEIKRELKRSEGDRRRTLSFAEKALKILANSFYGYMGYPRARWYRRECAESVAAFARMYIKQVMRIAEEEFKLEVVYGDTDSLFVVIPPEKRELAQKFLQKVNESMPGIIELEFEGFYRRGLFVTKKRYALLSEDGKMVVKGLEFVRRDWAPIARETQKEVLRILLEEADPEKAARLVRDVIERIRQRRVSLEDITIYTQLTKRIKSYKSLEPHVVAAQKLKERGREVAPGMIIGYIITKGTKGISQRATPVEFARLEDYDPEYYIDNQILPAIQRIFEAIGYTRDYLKEGITQTSLSRWF

SEQ ID NO: 2510 - protein, 792 aa, unidentified
  REGION 1..792: note = Description of Unknown: Synthetic polypeptide
MPRILKGFLIDADFETVEGRALIRLFLRGEEGSFVVYDDSFSPYFYALPGDEPERVKERILASGAAEAIQKVEIEEKRLFGTPRVALRITVSHPQDVPRIRERIRRVEGVDLILEHDILFVRRRLIDRGIKPLTWLRLEVEERDGRALLRGVEQLEEEPPELRVAAVAIAVYNPKGAPRSSKDEIIMISVATSDGVEKVLTWREVQGLEQVEVLQDEKEMLLRFAELIKEGDYDVIVGYNTDSFDFPYIRDRLKKLGISLPLGRLDAELEVSRRGALPEARIRGRAHVDLYPIVRRHVKLNSYDLESVVEELLGIKKEKLDGERLFTYWDEGGEKRALLARYALEDARVTLALAEKFLPLYCELSTIVGQSLNDVARMTSGQLVEWLLMRYATPRGELIPNHPAGEEYAARARATYAGGYVREPKRGLVEHIAVFDFRSFGPSIIVSHNIDPSTLIVGNCEENRAPELEYCFSLEREGFIPAILKELIRRRAEIKRELKRSEGDRRRTLSFAEKALKILANSFYGYMGYPRARWYRRECAESVAAFARMYIKQVMRIAEEEFKLEVVYGDTDSLFAVIPPEKRELAQKFLQKVNESMPGIIELEFEGFYRRGLFVTKKRYALLSEDGKMVVKGLEFVRRDWAPIARETQKEVLRILLEEADPEKAARLVRDVIERIRQRRVSLEDITIYTQLTKRIKSYKSLEPHVVAAQKLKERGREVAPGMIIGYIITKGTKGISQRATPVEFARLEDYDPEYYIDNQILPAIQRIFEAIGYTRDYLKEGITQTSLSRWF

SEQ ID NO: 2511 - protein, 792 aa, unidentified
  REGION 1..792: note = Description of Unknown: Synthetic polypeptide
MPRILKGFLIDADFETVEGRALIRLFLRGEEGSFVVYDDSFSPYFYALPGDEPERVKERILASGAAEAIQKVEIEEKRLFGTPRVALRITVSHPQDVPRIRERIRRVEGVDLILEHDILFVRRRLIDRGIKPLTWLRLEVEERDGRALLRGVEQLEEEPPELRVAAVAIAVYNPKGAPRSSKDEIIMISVATSDGVEKVLTWREVQGLEQVEVLQDEKEMLLRFAELIKEGDYDVIVGYNTDSFDFPYIRDRLKKLGISLPLGRLDAELEVSRRGALPEARIRGRAHVDLYPIVRRHVKLNSYDLESVVEELLGIKKEKLDGERLFTYWDEGGEKRALLARYALEDARVTLALAEKFLPLYCELSTIVGQSLNDVARMTSGQLVEWLLMRYATPRGELIPNHPAGEEYAARARATYAGGYVREPKRGLVEHIAVFDFRSFGPSIIVSHNIDPSTLIVGNCEENRAPELEYCFSLEREGFIPAILKELIRRRAEIKTELKRSEGDRRRTLSFAEKALKILANSFYGYMGYPRARWYRRECAESVAAFARMYIKQVMRIAEEEFKLEVVYGDTDSLFVVIPPEKRELAQKFLQKVNESMPGIIELEFEGFYRRGLFVTKKRYALLSEDGKMVVKGLEFVRRDWAPIARETQKEVLRILLEEADPEKAARLVRDVIERIRQRRVSLEDITIYTQLTKRIKSYKSLEPHVVAAQKLKERGREVAPGMIIGYIITKGTKGISQRATPVEFARLEDYDPEYYIDNQILPAIQRIFEAIGYTRDYLKEGITQTSLSRWF

SEQ ID NO: 2512 - protein, 792 aa, unidentified
  REGION 1..792: note = Description of Unknown: Synthetic polypeptide
MPRILKGFLIDADFETVEGRALIRLFLRGEEGSFVVYDDSFSPYFYALPGDEPERVKERILASGAAEAIQKVEIEEKRLFGTPRVALRITVSHPQDVPRIRERIRRVEGVDLILEHDILFVRRRLIDRGIKPLTWLRLEVEERDGRALLRGVEQLEEEPPELRVAAVAIAVYNPKGAPRSSKDEIIMISVATSDGVEKVLTWREVQGLEQVEVLQDEKEMLLRFAELIKEGDYDVIVGYNTDSFDFPYIRDRLKKLGISLPLGRLDAELEVSRRGALPEARIRGRAHVDLYPIVRRHVKLNSYDLESVVEELLGIKKEKLDGERLFTYWDEGGEKRALLARYALEDARVTLALAEKFLPLYCELSTIVGQSLNDVARMTSGQLVEWLLMRYATPRGELIPNHPAGEEYAARARATYAGGYVREPKRGLVEHIAVFDFRSFGPSIIVSHNIDPSTLIVGNCEENRAPELEYCFSLEREGFIPAILKELIRRRAEIKRELKRSEGDRRRTLSFAEKALKILANSFYGYMGYPRARWYRRECAESVAAFARMYIKQVMRIAEEEFKLEVVYGDTDSLFVVIPPEKRELAQKFLQKVNESMPGIIELEFEGFYRRGLFVTKKRYALLSEDGKMVVKGLEFVRRDWAPIARETQKEVLRILLEEADPEKAARLVRDVIERIRQRRVSLEDITIYTQLTKRIKSYKSLEPHVVAAQKLKERGREVAPGMIIGYIILKGTKGISQRATPVEFARLEDYDPEYYIDNQILPAIQRIFEAIGYTRDYLKEGITQTSLSRWF

SEQ ID NO: 2513 - protein, 792 aa, unidentified
  REGION 1..792: note = Description of Unknown: Synthetic polypeptide
MPRILKGFLIDADFETVEGRALIRLFLRGEEGSFVVYDDSFSPYFYALPGDEPERVKERILASGAAEAIQKVEIEEKRLFGTPRVALRITVSHPQDVPRIRERIRRVEGVDLILEHDILFVRRYLIDRGIKPLTWLRLEVEERDGRALLRGVEQLEEEPPELRVAAVAIAVYNPKGAPRSSKDEIIMISVATSDGVEKVLTWREVQGLEQVEVLQDEKEMLLRFAELIKEGDYDVIVGYNTDSFDFPYIRDRLKKLGISLPLGRLDAELEVSRRGALPEARIRGRAHVDLYPIVRRHVKLNSYDLESVVEELLGIKKEKLDGERLFTYWDEGGEKRALLARYALEDARVTLALAEKFLPLYCELSTIVGQSLNDVARMTSGQLVEWLLMRYATPRGELIPNHPAGEEYAARARATYAGGYVREPKRGLVEHIAVFDFRSFGPSIIVSHNIDPSTLIVGNCEENRAPELEYCFSLEREGFIPAILKELIRRRAEIKRELKRSEGDRRRTLSFAEKALKILANSFYGYMGYPRARWYRRECAESVAAFARMYIKQVMRIAEEEFKLEVVYGDTDSLFVVIPPEKRELAQKFLQKVNESMPGIIELEFEGFYRRGLFVTKKRYALLSEDGKMVVKGLEFVRRDWAPIARETQKEVLRILLEEADPEDAARLVRDVIERIRQRRVSLEDITIYTQLTKRIKSYKSLEPHVVAAQKLKERGREVAPGMIIGYIITKGTKGISQRATPVEFARLEDYDPEYYIDNQILPAIQRIFEAIGYTRDYLKEGITQTSLSRWF

SEQ ID NO: 2514 - protein, 792 aa, unidentified
  REGION 1..792: note = Description of Unknown: Synthetic polypeptide
MPRILKGFLIDADFETVEGRALIRLFLRGEEGSFVVYDDSFSPYFYALPGDEPERVKERILASGAAEAIQKVEIEEKRLFGTPRVALRITVSHPQDVPRIRERIRRVEGVDLILEHDILFVRRRLIDRGIKPLTWLRLEVEERDGRALLRGVEQLEEEPPELRVLAVAIAVYNPKGAPRSSKDEIIMISVATSDGVEKVLTWREVQGLEQVEVLQDEKEMLLRFAELIKEGDYDVIVGYNTDSFDFPYIRDRLKKLGISLPLGRLDAELEVSRRGALPEARIRGRAHVDLYPIVRRHVKLNSYDLESVVEELLGIKKEKLDGERLFTYWDEGGEKRALLARYALEDARVTLALAEKFLPLYCELSTIVGQSLNDVARMTSGQLVEWLLMRYATPRGELIPNHPAGEEYAARARATYAGGYVREPKRGLVEHIAVFDFRSFGPSIIVSHNIDPSTLIVGNCEENRAPELEYCFSLEREGFIPAILKELIRRRAEIKRELKRSEGDRRRTLSFAEKALKILANSFYGYMGYPRARWYRRECAESVAAFARMYIKQVMRIAEEEFKLEVVYGDTDSLFVVIPPEKRELAQKFLQKVNESMPGIIELEFEGFYRRGLFVTKKRYALLSEDGKMVVKGLEFVRRDWAPIARETQKEVLRILLEEADPEKAARLVRDVIERIRQRRVSLEDITIYTQLTKRIKSYKSLEPHVVAAQKLKERGREVAPGMIIGYIITKGTKGISQRATPVEFARLEDYDPEYYIDNQILPAIQRIFEAIGYTRDYLKEGITQTSLSRWF

SEQ ID NO: 2515 - protein, 792 aa, unidentified
  REGION 1..792: note = Description of Unknown: Synthetic polypeptide
MPRILKGFLIDADFETVEGRALIRLFLRGEEGSFVVYDDSFSPYFYALPGDEPERVKERILASGAAEAIQKVEIEEKRLFGTPRVALRITVSHPQDVPRIRERIRRVEGVDLILEHDILFVRRYLIDRGIKPLTWLRLEVEERDGRALLRGVEQLEEEPPELRVAAVAIAVYNPKGAPRSSKDEIIMISVATSDGVEKVLTWREVQGLEQVEVLQDEKEMLLRFAELIKEGDYDVIVGYNTDSFDFPYIRDRLKKLGISLPLGRLDAELEVSRRGALPEARIRGRAHVDLYPIVRRHVKLNSYDLESVVEELLGIKKEKLDGERLFTYWDEGGEKRALLARYALEDARVTLALAEKFLPLYCELSTIVGQSLNDVARMTSGQLVEWLLMRYATPRGELIPNHPAGEEYAARARATYAGGYVREPKRGLVEHIAVFDFRSFGPSIIVSHNIDPSTLIVGNCEENRAPELEYCFSLEREGFIPAILKELIRRRAEIKRELKRSEGDRRRTLSFAEKALKILANSFYGYMGYPRARWYRRECANSVAAFARMYIKQVMRIAEEEFKLEVVYGDTDSLFVVIPPEKRELAQKFLQKVNESMPGIIELEFEGFYRRGLFVTKKRYALLSEDGKMVVKGLEFVRRDWAPIARETQKEVLRILLEEADPEKAARLVRDVIERIRQRRVSLEDITIYTQLTKRIKSYKSLEPHVVAAQKLKERGREVAPGMIIGYIITKGTKGISQRATPVEFARLEDYDPEYYIDNQILPAIQRIFEAIGYTRDYLKEGITQTSLSRWF

SEQ ID NO: 2516 - protein, 792 aa, unidentified
  REGION 1..792: note = Description of Unknown: Synthetic polypeptide
MPRILKGFLIDADFETVEGRALIRLFLRGEEGSFVVYDDSFSPYFYALPGDEPERVKERILASGAAEAIQKVEIEEKRLFGTPRVALRITVSHPQDVPRIHERIRRVEGVDLILEHDILFVRRRLIDRGIKPLTWLRLEVEERDGRALLRGVEQLEEEPPELRVAAVAIAVYNPKGAPRSSKDEIIMISVATSDGVEKVLTWREVQGLEQVEVLQDEKEMLLRFAELIKEGDYDVIVGYNTDSFDFPYIRDRLKKLGISLPLGRLDAELEVSRRGALPEARIRGRAHVDLYPIVRRHVKLNSYDLESVVEELLGIKKEKLDGERLFTYWDEGGEKRALLARYALEDARVTLALAEKFLPLYCELSTIVGQSLNDVARMTSGQLVEWLLMRYATPRGELIPNHPAGEEYAARARATYAGGYVREPKRGLVEHIAVFDFRSFGPSIIVSHNIDPSTLIVGNCEENRAPELEYCFSLEREGFIPAILKELIRRRAEIKRELKRSEGDRRRTLSFAEKALKILANSFYGYMGYPRARWYRRECAESVAAFARMYIKQVMRIAEEEFKLEVVYGDTDSLFVVIPPEKRELAQKFLQKVNESMPGIIELEFEGFYRRGLFVTKKRYALLSEDGKMVVKGLEFVRRDWAPIARETQKEVLRILLEEADPEKAARLVRDVIERIRQRRVSLEDITIYTQLTKRIKSYKSLEPHVVAAQKLKERGREVAPGMIIGYIITKGTKGISQRATPVEFARLEDYDPEYYIDNQILPAIQRIFEAIGYTRDYLKEGITQTSLSRWF

SEQ ID NO: 2517 - protein, 792 aa, unidentified
  REGION 1..792: note = Description of Unknown: Synthetic polypeptide
MPRILKGFLIDADFETVEGRALIRLFLRGEEGSFVVYDDSFSPYFYALPGDEPERVKERILASGAAEAIQKVEIEEKRLFGTPRVALRITVSHPQDVPRIRERIRRVEGVDLILEHDILFVRRRLIDRGIKPLTWLRLEVEERDGRALLRGVEQLEEEPPELRVAAVAIAVYNPKGAPRSSKDEIIMISVATSDGVEKVLTWREVQGLEQVEVLQDEKEMLLRFAELIKEGDYDVIVGYNTDSFDFPYIRDALKKLGISLPLGRLDAELEVSRRGALPEARIRGRAHVDLYPIVRRHVKLNSYDLESVVEELLGIKKEKLDGERLFTYWDEGGEKRALLARYALEDARVTLALAEKFLPLYCELSTIVGQSLNDVARMTSGQLVEWLLMRYATPRGELIPNHPAGEEYAARARATYAGGYVREPKRGLVEHIAVFDFRSFGPSIIVSHNIDPSTLIVGNCEENRAPELEYCFSLEREGFIPAILKELIRRRAEIKRELKRSEGDRRRTLSFAEKALKILANSFYGYMGYPRARWYRRECAESVAAFARMYIKQVMRIAEEEFKLEVVYGDTDSLFVVIPPEKRELAQKFLQKVNESMPGIIELEFEGFYRRGLFVTKKRYALLSEDGKMVVKGLEFVRRDWAPIARETQKEVLRILLEEADPEKAARLVRDVIERIRQRRVSLEDITIYTQLTKRIKSYKSLEPHVVAAQKLKERGREVAPGMIIGYIITKGTKGISQRATPVEFARLEDYDPEYYIDNQILPAIQRIFEAIGYTRDYLKEGITQTSLSRWF

SEQ ID NO: 2518 - protein, 792 aa, unidentified
  REGION 1..792: note = Description of Unknown: Synthetic polypeptide
MPRILKGFLIDADFETVEGRALIRLFLRGEEGSFVVYDDSFSPYFYALPGDEPERVKERILASGAAEAIQKVEIEEKRLFGTPRVALRITVSHPQDVPRIRERIRRVEGVDLILEHDILFVRRRLIDRGIKPLTWLRLEVEERDGRALLRGVEQLEEEPPELRVAAVAIAVYNPKGAPRSSKDEIIMISVATSDGVEKVLTWREVQGLEQVEVLQDEKEMLLRFAELIKEGDYDVIVGYNTDSFDFPYIRDRLKKLGISLPLGRLDAELEVSRRGALPEARIRGRAHVDLYPIVRRHVKLNSYDLESVVEELLGIKKEKLDGERLFTYWDEGGEKRALLARYALEDARVTLALAEKFLPLYCELSTIVGQSLNDVARMTSGQLVEWLLYRYATPRGELIPNHPAGEEYAARARATYAGGYVREPKRGLVEHIAVFDFRSFGPSIIVSHNIDPSTLIVGNCEENRAPELEYCFSLEREGFIPAILKELIRRRAEIKRELKRSEGDRRRTLSFAEKALKILANSFYGYMGYPRARWYRRECAESVAAFARMYIKQVMRIAEEEFKLEVVYGDTDSLFVVIPPEKRELAQKFLQKVNESMPGIIELEFEGFYRRGLFVTKKRYALLSEDGKMVVKGLEFVRRDWAPIARETQKEVLRILLEEADPEKAARLVRDVIERIRQRRVSLEDITIYTQLTKRIKSYKSLEPHVVAAQKLKERGREVAPGMIIGYIITKGTKGISQRATPVEFARLEDYDPEYYIDNQILPAIQRIFEAIGYTRDYLKEGITQTSLSRWF

SEQ ID NO: 2519 - protein, 792 aa, unidentified
  REGION 1..792: note = Description of Unknown: Synthetic polypeptide
MPRILKGFLIDADFETVEGRALIRLFLRGEEGSFVVYDDSFSPYFYALPGDEPERVKERILASGAAEAIQKVEIEEKRLFGTPRVALRITVSHPQDVPRIRERIRRVEGVDLILEHDILFVRRRLIDRGIKPLTWLRLEVEERDGRALLRGVEQLEEEPPELRVAAVAIAVYNPKGAPRSSKDEIIMISVATSDGVEKVLTWREVQGLEQVEVLQDEKEMLLRFAELIKEGDYDVIVGYNTDSFDFPYIRDRLKKLGISLPLGRLDAELEVSRRGALPEARIRGRAHVDLYPIVRRHVKLNSYDLESVVEELLGIKKEKLDGERLFTYWDEGGEKRALLARYALEDARVTLALAEKFLPLYCELSTIVGQSLNDVARMTSGQLVEWLLMRYATPRGELIPNHPAGEEYAARARATYAGGYVREPKRGLVEHIAVFDFRSFGPSIIVSHNIDPSTLIVGNCEENRAPELEYCFSLEREGFIPAILKELIRRRAEIKRELKRSEGDRRRTLSFAEKALKILANSFYGYMGYPRARWYRRECAESVAAFARMYIKQVMRIAEEEFKLEVVYGDTDSLFVVIPPEKRELAQKFLQKVNESMPGIIELEFEGFYRRGLFVTKKRYAVLSEDGKMVVKGLEFVRRDWAPIARETQKEVLRILLEEADPEKAARLVRDVIERIRQRRVSLEDITIYTQLTKRIKSYKSLEPHVVAAQKLKERGREVAPGMIIGYIITKGTKGISQRATPVEFARLEDYDPEYYIDNQILPAIQRIFEAIGYTRDYLKEGITQTSLSRWF

SEQ ID NO: 2520 - protein, 792 aa, unidentified
  REGION 1..792: note = Description of Unknown: Synthetic polypeptide
MPRILKGFLIDADFETVEGRALIRLFLRGEEGSFVVYDDSFSPYFYALPGDEPERVKERILASGAAEAIQKVEIEEKRLFGTPRVALRITVSHPQDVPRIRERIRRVEGVDLILEHDILFVRRRLIDRGIKPLTWLRLEVEERDGRALLRGVEQLEEEPPELRVAAVAIAVYNPKGAPRSSKDEIIMISVATSDGVEKVLTWREVQGLEQVEVLQDEKEMLLRFAELIKEGDYDVIVGYNTDSFDFPYIRDRLKKLGISLPLGRLDAELEVSRRGALPEARIRGRAHVDLYPIVRRHVKLNSYDLESVVEELLGIKKEKLDGERLFTYWDEGGEKRALLARYALEDARVTLALAEKFLPLYCELSTIVGQSLNDVARMTSGQLVEWLLMRYATPRGELIPNHPAGEEYAARARATYAGGYVREPKRGLVEHIAVFDFRSFGPSIIVSHNIDPSTLIVGNCEENRAPELEYCFSLEREGFIPAILKELIRRRAEIKRELKRSEGDRRRTLSFAEKALKILANSFYGYMGYPRARWYRRECAESVAAFARMYIKQVMRIAEEEFKLEVVYGDTDSLFVVIPPEKRELAQKFLQKVNESMPGIIELEFEGFYRRGLFVTKKRYALLSEDGKMVVKGLEFVRRDWAPIARETQKEVLRILLEEGDPEKAARLVRDVIERIRQRRVSLEDITIYTQLTKRIKSYKSLEPHVVAAQKLKERGREVAPGMIIGYIITKGTKGISQRATPVEFARLEDYDPEYYIDNQILPAIQRIFEAIGYTRDYLKEGITQTSLSRWF

SEQ ID NO: 2521 - protein, 792 aa, unidentified
  REGION 1..792: note = Description of Unknown: Synthetic polypeptide
MPRILKGFLIDADFETVEGRALIRLFLRGEEGSFVVYDDSFSPYFYALPGDEPERVKERILASGAAEAIQKVEIEEKRLFGTPRVALRITVSHPQDVPRIRERIRRVEGVDLILEHDILFVRRRLIDRGIKPLTWLRLEVEERDGRALLRGVEQLEEEPPELRVAAVAIAVYNPKGAPRSSKDEIIMISVATSDGVEKVLTWREVQGLEQVEVLQDEKEMLLRFAELIKEGDYDVIVGYNTDSFDFPYIRDRLKKLGVSLPLGRLDAELEVSRRGALPEARIRGRAHVDLYPIVRRHVKLNSYDLESVVEELLGIKKEKLDGERLFTYWDEGGEKRALLARYALEDARVTLALAEKFLPLYCELSTIVGQSLNDVARMTSGQLVEWLLMRYATPRGELIPNHPAGEEYAARARATYAGGYVREPKRGLVEHIAVFDFRSFGPSIIVSHNIDPSTLIVGNCEENRAPELEYCFSLEREGFIPAILKELIRRRAEIKRELKRSEGDRRRTLSFAEKALKILANSFYGYMGYPRARWYRRECAESVAAFARMYIKQVMRIAEEEFKLEVVYGDTDSLFVVIPPEKRELAQKFLQKVNESMPGIIELEFEGFYRRGLFVTKKRYALLSEDGKMVVKGLEFVRRDWAPIARETQKEVLRILLEEADPEKAARLVRDVIERIRQRRVSLEDITIYTQLTKRIKSYKSLEPHVVAAQKLKERGREVAPGMIIGYIITKGTKGISQRATPVEFARLEDYDPEYYIDNQILPAIQRIFEAIGYTRDYLKEGITQTSLSRWF

SEQ ID NO: 2522 - protein, 792 aa, unidentified
  REGION 1..792: note = Description of Unknown: Synthetic polypeptide
MPRILKGFLIDADFETVEGRALIRLFLRGEEGSFVVYDDSFSPYFYALPGDEPERVKERILASGAAEAIQKVEIEEKRLFGTPRVALRITVSHPQDVPRIRERIRRVEGVDLILEHDILFVRRYLIDRGIKPLTWLRLEVEERDGRALLRGVEQLEEEPPELRVAAVAIAVYNPKGAPRSSKDEIIMISVATSDGVEKVLTWREVQGLEQVEVLQDEKEMLLRFAELIKEGDYDVIVGYNTDSFDFPYIRDRLKKLGISLPLGRLDAELEVSRRGALPEARIRGRAHVDLYPIVRRHVKLNSYPLESVVEELLGIKKEKLDGERLFTYWDEGGEKRALLARYALEDARVTLALAEKFLPLYCELSTIVGQSLNDVARMTSGQLVEWLLMRYATPRGELIPNHPAGEEYAARARATYAGGYVREPKRGLVEHIAVFDFRSFGPSIIVSHNIDPSTLIVGNCEENRAPELEYCFSLEREGFIPAILKELIRRRAEIKRELKRSEGDRRRTLSFAEKALKILANSFYGYMGYPRARWYRRECAESVAAFARMYIKQVMRIAEEEFKLEVVYGDTDSLFVVIPPEKRELAQKFLQKVNESMPGIIELEFEGFYRRGLFVTKKRYALLSEDGKMVVKGLEFVRRDWAPIARETQKEVLRILLEEADPEKAARLVRDVIERIRQRRVSLEDITIYTQLTKRIKSYKSLEPHVVAAQKLKERGREVAPGMIIGYIITKGTKGISQRATPVEFARLEDYDPEYYIDNQILPAIQRIFEAIGYTRDYLKEGITQTSLSRWF

SEQ ID NO: 2523 - protein, 792 aa, unidentified
  REGION 1..792: note = Description of Unknown: Synthetic polypeptide
MPRILKGFLIDADFETVEGRALIRLFLRGEEGSFVVYDDSFSPYFYALPGDEPERVKERILASGAAEAIQKVEIEEKRLFGTPRVALRITVSHPQDVPRIRERIRRVEGVDLILEHDILFVRRRLIDRGIKPLTWLRLEVEERDGRALLRGVEQLEEEPPELRVAAVAIAVYNPKGAPRSSKDEIIMISVATSDGVEKVLTWREVQGLEQVEVLQDEKEMLLRFAELIKEGDPDVIVGYNTDSFDFPYIRDRLKKLGISLPLGRLDAELEVSRRGALPEARIRGRAHVDLYPIVRRHVKLNSYDLESVVEELLGIKKEKLDGERLFTYWDEGGEKRALLARYALEDARVTLALAEKFLPLYCELSTIVGQSLNDVARMTSGQLVEWLLMRYATPRGELIPNHPAGEEYAARARATYAGGYVREPKRGLVEHIAVFDFRSFGPSIIVSHNIDPSTLIVGNCEENRAPELEYCFSLEREGFIPAILKELIRRRAEIKRELKRSEGDRRRTLSFAEKALKILANSFYGYMGYPRARWYRRECAESVAAFARMYIKQVMRIAEEEFKLEVVYGDTDSLFVVIPPEKRELAQKFLQKVNESMPGIIELEFEGFYRRGLFVTKKRYALLSEDGKMVVKGLEFVRRDWAPIARETQKEVLRILLEEADPEKAARLVRDVIERIRQRRVSLEDITIYTQLTKRIKSYKSLEPHVVAAQKLKERGREVAPGMIIGYIITKGTKGISQRATPVEFARLEDYDPEYYIDNQILPAIQRIFEAIGYTRDYLKEGITQTSLSRWF

SEQ ID NO: 2524 - protein, 792 aa, unidentified
  REGION 1..792: note = Description of Unknown: Synthetic polypeptide
MPRILKGFLIDADFETVEGRALIRLFQRGEEGSFVVYDDSFSPYFYADPGDEPERVKERILASGAAEAIQKVEIEEKRLFGTPRVALRITVSHPQDVPRIRERIRRVEGVDLILEHDILFVRRRLIDRGIKPLTWLRLEVEERDGRALLRGVEQLEEEPPELRVAAVAIAVYNPKGAPRSSKDEIIMISVATSDGVEKVLTWREVQGLEQVEVLQDEKEMLLRFAELIKEGDYDVIVGYNTDSFDFPYIRDRLKKLGISLPLGRLDAELEVSRRGALPEARIRGRAHVDLYPIVRRHVKLNSYDLESVVEELLGIKKEKLDGERLFTYWDEGGEKRALLARYALEDARVTLALAEKFLPLYCELSTIVGQSLNDVARMTSGQLVEWLLMRYATPRGELIPNHPAGEEYAARARATYAGGYVREPKRGLVEHIAVFDFRSFGPSIIVSHNIDPSTLIVGNCEENRAPELEYCFSLEREGFIPAILKELIRRRAEIKRELKRSEGDRRRTLSFAEKALKILANSFYGYMGYPRARWYRRECAESVAAFARMYIKQVMRIAEEEFKLEVVYGDTDSLFVVIPPEKRELAQKFLQKVNESMPGIIELEFEGFYRRGLFVTKKRYALLSEDGKMVVKGLEFVRRDWAPIARETQKEVLRILLEEADPEKAARLVRDVIERIRQRRVSLEDITIYTQLTKRIKSYKSLEPHVVAAQKLKERGREVAPGMIIGYIITKGTKGISQRATPVEFARLEDYDPEYYIDNQILPAIQRIFEAIGYTRDYLKEGITQTSLSRWF

SEQ ID NO: 2525 - protein, 792 aa, unidentified
  REGION 1..792: note = Description of Unknown: Synthetic polypeptide
MPRILKGFLIDADFETVEGRALIRLFLRGEEGSFVVYDDSFSPYFYALPGDEPERVKERILASGAAEAIQKVEIEEKRLFGTPRVALRITVSHPQDVPRIRERIRRVEGVDLILEHDILFVRRYLIDRGIKPLTWLRLEVEERDGRALLRGVEQLEEEPPELRVAAVAIAVYNPKGAPRSSKDEIIMISVATSDGVEKVLTWREVQGLEQVEVLQDEKEMLLRFAELIKEGDYDVIVGYNTDSFDFPYIRDRLKKLGISLPLGRLDAELEVSRRGALPEARIRGRAHVDLYPIVRRHVKLNSYVLESVVEELLGIKKEKLDGERLFTYWDEGGEKRALLARYALEDARVTLALAEKFLPLYCELSTIVGQSLNDVARMTSGQLVEWLLMRYATPRGELIPNHPAGEEYAARARATYAGGYVREPKRGLVEHIAVFDFRSFGPSIIVSHNIDPSTLIVGNCEENRAPELEYCFSLEREGFIPAILKELIRRRAEIKRELKRSEGDRRRTLSFAEKALKILANSFYGYMGYPRARWYRRECAESVAAFARMYIKQVMRIAEEEFKLEVVYGDTDSLFVVIPPEKRELAQKFLQKVNESMPGIIELEFEGFYRRGLFVTKKRYALLSEDGKMVVKKLEFVRRDWAPIARETQKEVLRILLEEADPEKAARLVRDVIERIRQRRVSLEDITIYTQLTKRIKSYKRLEPHVVAAQKLKERGREVAPGMIIGYIITKGTKRISQRATPVEFARLEDYDPEYYIDNQILPAIQRIFEAIGYTRDYLKEGITQTSLSRWF

SEQ ID NO: 2526 - protein, 792 aa, unidentified
  REGION 1..792: note = Description of Unknown: Synthetic polypeptide
MPRILKGFLIDADFETVEGRALIRLFLRGEEGSFVVYDDSFSPYFYALPGDEPERVKERILASGAAEAIQKVEIEEKRLFGTPRVALRITVSHPQDVPRIRERIRRVEGVDLILEHDILFVRRRLIDRGIKPLTWLRLEVEERDGRALLRGVEQLEEEPPELRVAAVAIAVYNPKGAPRSSKDEIIMISVATSDGVEKVLTWREVQGLEQVEVLQDEKEMLLRFAELIKEGDYDVIVGYNTDSFDFPYIRDRLKKLGISLPLGRLDAELEVSRRGALPEARIRGRAHVDLYPIVRRHVKLNSYDLESVVEELLGIKKEKLDGERLFTYWDEGGEKRALLARYALEDARVTLALAEKFLPLYCELSTIVGQSLNDVARMTSGQLVEWLLMRYATPRGELIPNHPAGEEYAARARATYAGGYVREPKRGLVEHIAVFDFRSFGPSIIVSHNIDPSTLIVGNCEENRAPELEYCFSLEREGFIPAILKELIRRRAEIKRELKRSEGDRRRTLSFAEKALKILANSFYGYMGYPRARWYRRECAESVAAFARMYIKQVMRIAEEEFKLEVVYGDTDSLFVVIPPEKRELAQKFLQKVNESMPGIIELEFEGFYRRGLFVTKKRYALLSEDGKMVVKGLEFVRRDWAPIARETQKEVLRILLEEADPEKAARLVRDVIERIRQRRVSLEDITIYTQLTKRIKSYKSLEPHVVAAQKLKERGREVAPGMIIGYIITKGTKGISQRATPVEFARLEDYDPEYYIDNQILPAVQRIFEAIGYTRDYLKEGITQTSLSRWF

SEQ ID NO: 2527 - protein, 792 aa, unidentified
  REGION 1..792: note = Description of Unknown: Synthetic polypeptide
MPRILKGFLIDADFETVEGRALIRLFLRGEEGSFVVYDDSFSPYFYALPGDEPERVKERILASGAAEAIQKVEIEEKRLFGTPRVALRITVSHPQDVPRIRERIRRVEGVDLILEHDILFVRRRLIDRGIKPLTWLRLEVEERDGRALLRGVEQLEEEPPELRVAAVAIAVYNPKGAPRSSKDEIIMISVATSDGVEKVLTWREVQGLEQVEVLQDEKEMLLRFAELIKEGDYDVIVGYNTDSFDFPYIRDRLKKLGISLPLGRLDAELEVSRRGALPEARIRGRAHVDLYPIVRRHVKLNSYDLESVVEELLGIKKEKLDGERLFTYWDEGGEKRALLARYALEDARVTLALAEKFLPLYCELSTIVGQSLNDVARMTSGQLVEWLLMRYATPRGELIPNHPAGEEYAARARATYAGGYVREPKRGLVEHIAVFDFRSFGPSIIVSHNIDPSTLIVGNCEENRAPELEYCFSLEREGFIPAILKELIRRRAEIKRELKRSEGDRRRTLSFAEKALKILANSFYGYMGYPRARWYRRECAESVAAFARMYIKQVMRIAEEEFKLEVVYGDTDSLFVVIPPEKRELAQKFLQKVNESMPGIIELEFEGFYRRGLFVTKKRYALLSEDGKMVTKGLEFVRRDWAPIARETQKEVLRILLEEADPEKAARLVRDVIERIRQRRVSLEDITIYTQLTKRIKSYKSLEPHVVAAQKLKERGREVAPGMIIGYIITKGTKGISQRATPVEFARLEDYDPEYYIDNQILPAIQRIFEAIGYTRDYLKEGITQTSLSRWF

SEQ ID NO: 2528 - protein, 792 aa, unidentified
  REGION 1..792: note = Description of Unknown: Synthetic polypeptide
MPRILKGFLIDADFETVEGRALIRLFLRGEEGSFVVYDDSFSPYFYALPGDEPERVKERILASGAAEAIQKVEIEEKRLFGTPRVALRITVSHPQDVPRIRERIRRVEGVDLILEHDILFVRRRLIDRGIKPLTWLRLEVEERDGRALLRGVEQLEEEPPELRVAAVAIAVYNPKGAPRSSKDEIIMISVATSDGVEKVLTWREVQGLEQVEVLQDEKEMLLRFAELIKEGDYDVIVGYNTDSFDFPYIRDRLKKLGISLPLGRLDAELEVSRRGALPEARIRGRAHVDLYPIVRRHVKLNSYDLESVVEELLGIKKEKLDGERLFTYWDEGGEKRALLARYALEDARVTLALAEKFLPLYCELSTIVGQSLNDVARMTSGQLVEWLLMRYATPRGELIPNHPAGEEYAARARATYAGGYVREPKRGLVEHIAVFDFRSFGPSIIVSHNIDPSTLIVGNCEENRAPELEYCFSLEREGFIPAILKELIRRRAEIKRELKRSEGDRRRTLSFAEKALKILANSFYGYMGYPRARWYRRECAESVAAFARMYIKQVMRIAEEEFKLEVVYGDTDSLFVVIPPEKRELAQKFLQKVNESMPGIIELEFEGFYRRGLFVTKKRYALLSEDGKMVVKGLEIVRRDWAPIARETQKEVLRILLEEADPEKAARLVRDVIERIRQRRVSLEDITIYTQLTKRIKSYKSLEPHVVAAQKLKERGREVAPGMIIGYIITKGTKGISQRATPVEFARLEDYDPEYYIDNQILPAIQRIFEAIGYTRDYLKEGITQTSLSRWF

SEQ ID NO: 2529 - protein, 790 aa, unidentified
  REGION 1..790: note = Description of Unknown: Synthetic polypeptide
MPRILKGFLIDADFETVEGRALIRLFLRGEEGSFVVYDDSFSPYFYALPGDEPERVKERILASGAAEAIQKVEIEEKRLFGTPRVALRITVSHPQDVPRIRERIRRVEGVDLILEHDILFVRRYLIDRGIKPLTWLRLEVEERDGRALLREQLEEEPPELRVAAVAIAVYNPKGAPRSSKDEIIMISVATSDGVEKVLTWREVQGLEQVEVLQDEKEMLLRFAELIKEGDYDVIVGYNTDSFDFPYIRDRLKKLGISLPLGRLDAELEVSRRGALPEARIRGRAHVDLYPIVRRHVKLNSYDLESVVEELLGIKKEKLDGERLFTYWDEGGEKRALLARYALEDARVTLALAEKFLPLYCELSTIVGQSLNDVARMTSGQLVEWLLMRYATPRGELIPNHPAGEEYAARARATYAGGYVREPKRGLVEHIAVFDFRSFGPSIIVSHNIDPSTLIVGNCEENRAPELEYCFSLEREGFIPAILKELIRRRAEIKRELKRSEGDRRRTLSFAEKALKILANSFYGYMGYPRARWYRRECAESVAAFARMYIKQVMRIAEEEFKLEVVYGDTDSLFVVIPPEKRELAQKFLQKVNESMPGIIELEFEGFYRRGLFVTKKRYALLSEDGKMVVKGLEFVRRDWAPIARETQKEVLRILLEEADPEKAARLVRDVIERIRQRRVSLEDITIYTQLTKRIKSYKSLEPHVVAAQKLKERGREVAPGMIIGYIITKGTKGISQRATPVEFARLEDYDPEYYIDNQILPAIQRIFEAIGYTRDYLKEGITQTSLSRWF

SEQ ID NO: 2530 - protein, 792 aa, unidentified
  REGION 1..792: note = Description of Unknown: Synthetic polypeptide
MPRILKGFLIDADFETVEGRALIRLFLRGEEGSFVVYDDSFSPYFYALPGDEPERVKERILASGAAEAIQKVEIEEKRLFGTPRVALRITVSHPQDVPRIRERIRRVEGVDLILEHDILFVRRRLIDRGIKPLTWLRLEVEERDGRALLRGVEQLEEEPPELRVAAVAIAVYNPKGAPRSSKDEIIMISVATSDGVEKVLTWREVQGLEQVEVLQDEKEMLLRFAELIKEGDYDVIVGYNTDSFDFPYIRDRLKKLGISLPLGRLDAELEVSRRGALPEARIRGRAHVDLYPIVRRHVKLNSYDLESVVEELLGIKKEKLDGERLFTYWDEGGEKRALLARYALEDARVTLALAEKFLPLYCELSTIVGQSLNDVARMTSGQLVEWLLMRYATPRGELIPNHPAGEEYAARARATYAGGYVREPKRGLWEHIAVFDFRSFGPSIIVSHNIDPSTLIVGNCEENRAPELEYCFSLEREGFIPAILKELIRRRAEIKRELKRSEGDRRRTLSFAEKALKILANSFYGYMGYPRARWYRRECAESVAAFARMYIKQVMRIAEEEFKLEVVYGDTDSLFVVIPPEKRELAQKFLQKVNESMPGIIELEFEGFYRRGLFVTKKRYALLSEDGKMVVKGLEFVRRDWAPIARETQKEVLRILLEEADPEKAARLVRDVIERIRQRRVSLEDITIYTQLTKRIKSYKSLEPHVVAAQKLKERGREVAPGMIIGYIITKGTKGISQRATPVEFARLEDYDPEYYIDNQILPAIQRIFEAIGYTRDYLKEGITQTSLSRWF

SEQ ID NO: 2531 - protein, 792 aa, unidentified
  REGION 1..792: note = Description of Unknown: Synthetic polypeptide
MPRILKGFLIDADFETVEGRALIRLFLRGEEGSFVVYDDSFSPYFYALPGDEPERVKERILASGAAEAIQKVEIEEKRLFGTPRVALRITVSHPQDVPRIRERIRRVEGVDLILEHDILFVRRRLIDRGIKPLTWLRLEVEERDGRALLRGVEQLREEPPELRVAAVAIAVYNPKGAPRSSKDEIIMISVATSDGVEKVLTWREVQGLEQVEVLQDEKEMLLRFAELIKEGDYDVIVGYNTDSFDFPYIRDRLKKLGISLPLGRLDAELEVSRRGALPEARIRGRAHVDLYPIVRRHVKLNSYDLESVVEELLGIKKEKLDGERLFTYWDEGGEKRALLARYALEDARVTLALAEKFLPLYCELSTIVGQSLNDVARMTSGQLVEWLLMRYATPRGELIPNHPAGEEYAARARATYAGGYVREPKRGLVEHIAVFDFRSFGPSIIVSHNIDPSTLIVGNCEENRAPELEYCFSLEREGFIPAILKELIRRRAEIKRELKRSEGDRRRTLSFAEKALKILANSFYGYMGYPRARWYRRECAESVAAFARMYIKQVMRIAEEEFKLEVVYGDTDSLFVVIPPEKRELAQKFLQKVNESMPGIIELEFEGFYRRGLFVTKKRYALLSEDGKMVVKGLEFVRRDWAPIARETQKEVLRILLEEADPEKAARLVRDVIERIRQRRVSLEDITIYTQLTKRIKSYKSLEPHVVAAQKLKERGREVAPGMIIGYIITKGTKGISQRATPVEFARLEDYDPEYYIDNQILPAIQRIFEAIGYTRDYLKEGITQTSLSRWF

SEQ ID NO: 2532 - protein, 792 aa, unidentified
  REGION 1..792: note = Description of Unknown: Synthetic polypeptide
MPRILKGFLIDADFETVEGRALIRLFLRGEEGSFVVYDDSFSPYFYALPGDEPERVKERILASGAAEAIQKVEIEEKRLFGTPRVALRITVSHPQDVPRIRERIRRVEGVDLILEHDILFVRRYLIDRGIKPLTWLRLEVEERDGRALLRGVEQLEEEPPELRVAAVAIAVYNPKGAPRSSKDEIIMISVATSDGVEKVLTWREVQGLEQVEVLQDEKEMLLRFAELIKEGDYDVIVGYNTDSFDFPYIRDRLKKLGISLPLGRLDAELEVSRRGALPEARIRGRAHVDLYPIVRRHVKLNSYDLESVVEELLGIKKEKLDGERLFTYWDEGGEKRALLARYALEDARVTLALAEKFLPLYCELSTIVGQSLNDVARMTSGQLVEWLLMRYATPRGELIPNHPAGEEYAARARATYAGGYVREPKRGLVEHIAVFDFRSFGPSIIVSHNIDPSTLIVGNCEENRAPELEYCFSLEREGFIPAILKELIRRRAEIKRELKRSEGDRRRTLSFAEKALKILANSFYGYMGYPRARWYRRECAISVAAFARMYIKQVMRIAEEEFKLEVVYGDTDSLFVVIPPEKRELAQKFLQKVNESMPGIIELEFEGFYRRGLFVTKKRYALLSEDGKMVVKGLEFVRRDWAPIARETQKEVLRILLEEADPEKAARLVRDVIERIRQRRVSLEDITIYTQLTKRIKSYKSLEPHVVAAQKLKERGREVAPGMIIGYIITKGTKGISQRATPVEFARLEDYDPEYYIDNQILPAIQRIFEAIGYTRDYLKEGITQTSLSRWF

SEQ ID NO: 2533 - protein, 792 aa, unidentified
  REGION 1..792: note = Description of Unknown: Synthetic polypeptide
MPRILKGFLIDADFETVEGRALIRLFLRGEEGSFVVYDDSFSPYFYADPGDEPERVKERILASGAAEAIQKVEIEEKRLFGTPRVALRITVSHPQDVPRIRERIRRVEGVDLILEHDILFVRRYLIDRGIKPLTWLRLEVEERDGRALLRGVEQLEEEPPELRVAAVAIAVYNPKGAPRSSKDEIIMISVATSDGVEKVLTWREVQGLEQVEVLQDEKEMLLRFAELIKEGDYDVIVGYNTDSFDFPYIRDRLKKLGISLPLGRLDAELEVSRRGALPEARIRGRAHVDLYPIVRRHVKLNSYVLESVVEELLGIKKEKLDGERLFTYWDEGGEKRALLARYALEDARVTLALAEKFLPLYCELSTIVGQSLNDVARMTSGQLVEWLLMRYATPRGELIPNHPAGEEYAARARATYAGGYVREPKRGLVEHIAVFDFRSIGPSIIVSHNIDPSTLIVGNCEENRAPELEYCFSLEREGFIPAILKELIRRRAEIKRELKRSEGDRRRTLSFAEKRLKILANSFYGYMGYPRARWYRRECAESVAAFARMYIKQVMRIAEEEFKLEVVYGDTDSLFVVIPPEKRELAQKFLQKVNESMPGIIELEFEGFYRRGLFVTKKRYALLSEDGKMVVKGLEFVRRDWAPIARETQKEVLRILLEEADPEKAARLVRDVIERIRQRRVSLEDITIYTQLTKRIKSYKSLEPHVVAAQKLKERGREVAPGMIIGYIITKGTKGISQRATPVEFARLEDYDPEYYIDNQILPAIQRIFEAIGYTRDYLKEGITQTSLSRWF

SEQ ID NO: 2534 - protein, 792 aa, unidentified
  REGION 1..792: note = Description of Unknown: Synthetic polypeptide
MPRILKGFLIDADFETVEGRALIRLFLRGEEGSFVVYDDSFSPYFYALPGDEPERVKERILASGAAEAIQKVEIEEKRLFGTPRVALRITVSHPQDVPRIRERIRRVEGVDLILEHDILFVRRRLIDRGIKPLTWLRLEVEERDGRALLRGVEQLEEEPPELRVAAVAIVVYNPKGAPRSSKDEIIMISVATSDGVEKVLTWREVQGLEQVEVLQDEKEMLLRFAELIKEGDYDVIVGYNTDSFDFPYIRDRLKKLGISLPLGRLDAELEVSRRGALPEARIRGRAHVDLYPIVRRHVKLNSYDLESVVEELLGIKKEKLDGERLFTYWDEGGEKRALLARYALEDARVTLALAEKFLPLYCELSTIVGQSLNDVARMTSGQLVEWLLMRYATPRGELIPNHPAGEEYAARARATYAGGYVREPKRGLVEHIAVFDFRSFGPSIIVSHNIDPSTLIVGNCEENRAPELEYCFSLEREGFIPAILKELIRRRAEIKRELKRSEGDRRRTLSFAEKALKILANSFYGYMGYPRARWYRRECAESVAAFARMYIKQVMRIAEEEFKLEVVYGDTDSLFVVIPPEKRELAQKFLQKVNESMPGIIELEFEGFYRRGLFVTKKRYALLSEDGKMVVKGLEFVRRDWAPIARETQKEVLRILLEEADPEKAARLVRDVIERIRQRRVSLEDITIYTQLTKRIKSYKSLEPHVVAAQKLKERGREVAPGMIIGYIITKGTKGISQRATPVEFARLEDYDPEYYIDNQILPAIQRIFEAIGYTRDYLKEGITQTSLSRWF

SEQ ID NO: 2535 - protein, 792 aa, unidentified
  REGION 1..792: note = Description of Unknown: Synthetic polypeptide
MPRILKGFLIDADFETVEGRALIRLFLRGEEGSFVVYDDSFSPYFYALPGDEPERVKERILASGAAEAIQKVEIEEKRLFGTPRVALRITVSHPQDVPRIRERIRRVEGVDLILEHDILFVRRRLIDRGIKPLTWLRLEVEERDGRALLRGVEQLEEEPPELRVAAVAIAVYNPKGAPRSSKDEIIMISVATSDGVEKVLTWREVQGLEQVEVLQDEKEMLLRFAELIKEGDYDVIVGYNTDSFDFPYIRDRLKKLGISLPLGRLDAELEVSRRGALPEARIRGRAHVDLYPIVRRHVKLNSYDLESVVEELLGIKKEKLDGERLFTYWDEGGEKRALLARYALEDARVTLALAEKFLPLYCELSTIVGQSLNDVARMTSGQLVEWLLMRYATPRGELIPNHPAGEEYAARARATYAGGYVREPKRGLVEHIAVFDFRSFGPSIIVSHNIDPSTLIVGNCEENRAPELEYCFSLEREGFIPAILKELIRRRAEIKRELKRSEGDRRRTLSFAEKALKILANSFYGYMGYPRARWYRRECAESVTAFARMYIKQVMRIAEEEFKLEVVYGDTDSLFVVIPPEKRELAQKFLQKVNESMPGIIELEFEGFYRRGLFVTKKRYALLSEDGKMVVKGLEFVRRDWAPIARETQKEVLRILLEEADPEKAARLVRDVIERIRQRRVSLEDITIYTQLTKRIKSYKSLEPHVVAAQKLKERGREVAPGMIIGYIITKGTKGISQRATPVEFARLEDYDPEYYIDNQILPAIQRIFEAIGYTRDYLKEGITQTSLSRWF

SEQ ID NO: 2536 - protein, 792 aa, unidentified
  REGION 1..792: note = Description of Unknown: Synthetic polypeptide
MPRILKGFLIDADFETVEGRALIRLFLRGEEGSFVVYDDSFSPYFYALPGDEPERVKERILASGAAEAIQKVEIEEKRLFGTPRVALRITVSHPQDVPRIRERIRRVEGVDLILEHDILFVRRRLIDRGIKPLTWLRLEVEERDGRALLRGVEQLEEEPPELRVAAVAIAVYNPKGAPRSSKDEIIMISVATSDGVEKVLTWREVQGLEQVEVLQDEKEMLLRFAELIKEGDYDVIVGYNTDSFDFPYIRDRLKKLGISLPLGRLDAELEVSRRKALPEARIRGRAHVDLYPIVRRHVKLNSYDLESVVEELLGIKKEKLDGERLFTYWDEGGEKRALLARYALEDARVTLALAEKFLPLYCELSTIVGQSLNDVARMTSGQLVEWLLMRYATPRGELIPNHPAGEEYAARARATYAGGYVREPKRGLVEHIAVFDFRSFGPSIIVSHNIDPSTLIVGNCEENRAPELEYCFSLEREGFIPAILKELIRRRAEIKRELKRSEGDRRRTLSFAEKALKILANSFYGYMGYPRARWYRRECAESVAAFARMYIKQVMRIAEEEFKLEVVYGDTDSLFVVIPPEKRELAQKFLQKVNESMPGIIELEFEGFYRRGLFVTKKRYALLSEDGKMVVKGLEFVRRDWAPIARETQKEVLRILLEEADPEKAARLVRDVIERIRQRRVSLEDITIYTQLTKRIKSYKSLEPHVVAAQKLKERGREVAPGMIIGYIITKGTKGISQRATPVEFARLEDYDPEYYIDNQILPAIQRIFEAIGYTRDYLKEGITQTSLSRWF

SEQ ID NO: 2537 - protein, 792 aa, unidentified
  REGION 1..792: note = Description of Unknown: Synthetic polypeptide
MPRILKGFLIDADFETVEGRALIRLFLRGEEGSFVVYDDSFSPYFYALPGDEPERVKERILASGAAEAIQKVEIEEKRLFGTPRVALRITVSHPQDVPRIRERIRRVEGVDLILEHDILFVRRRLIDRGIKPLTWLRLEVEERDGRALLRGVEQLEEEPPELRVAAVAIAVYNPKGAPRSSKDEIIMISVATSDGVEKVLTWREVQGLEQVEVLQDEKEMLLRFAELIKEGDYDVIVGYNTDSFDFPYIRDRLKKLGISLPLGRLDAELEVSRRGALPEARIRGRAHVDLYPIVRRYVKLNSYDLESVVEELLGIKKEKLDGERLFTYWDEGGEKRALLARYALEDARVTLALAEKFLPLYCELSTIVGQSLNDVARMTSGQLVEWLLMRYATPRGELIPNHPAGEEYAARARATYAGGYVREPKRGLVEHIAVFDFRSFGPSIIVSHNIDPSTLIVGNCEENRAPELEYCFSLEREGFIPAILKELIRRRAEIKRELKRSEGDRRRTLSFAEKALKILANSFYGYMGYPRARWYRRECAESVAAFARMYIKQVMRIAEEEFKLEVVYGDTDSLFVVIPPEKRELAQKFLQKVNESMPGIIELEFEGFYRRGLFVTKKRYALLSEDGKMVVKGLEFVRRDWAPIARETQKEVLRILLEEADPEKAARLVRDVIERIRQRRVSLEDITIYTQLTKRIKSYKSLEPHVVAAQKLKERGREVAPGMIIGYIITKGTKGISQRATPVEFARLEDYDPEYYIDNQILPAIQRIFEAIGYTRDYLKEGITQTSLSRWF

SEQ ID NO: 2538 - protein, 792 aa, unidentified
  REGION 1..792: note = Description of Unknown: Synthetic polypeptide
MPRILKGFLIDADFETVEGRALIRLFLRGEEGSFVVYDDSFSPYFYALPGDEPERVKERILASGAAEAIQKVEIEEKRLFGTPRVALRITVSHPQDVPRIRERIRRVEGVDLILEHDILFVSRRLIDRGIKPLTWLRLEVEERDGRALLRGVEQLEEEPPELRVAAVAIAVYNPKGAPRSSKDEIIMISVATSDGVEKVLTWREVQGLEQVEVLQDEKEMLLRFAELIKEGDYDVIVGYNTDSFDFPYIRDRLKKLGISLPLGRLDAELEVSRRGALPEARIRGRAHVDLYPIVRRHVKLNSYDLESVVEELLGIKKEKLDGERLFTYWDEGGEKRALLARYALEDARVTLALAEKFLPLYCELSTIVGQSLNDVARMTSGQLVEWLLMRYATPRGELIPNHPAGEEYAARARATYAGGYVREPKRGLVEHIAVFDFRSFGPSIIVSHNIDPSTLIVGNCEENRAPELEYCFSLEREGFIPAILKELIRRRAEIKRELKRSEGDRRRTLSFAEKALKILANSFYGYMGYPRARWYRRECAESVAAFARMYIKQVMRIAEEEFKLEVVYGDTDSLFVVIPPEKRELAQKFLQKVNESMPGIIELEFEGFYRRGLFVTKKRYALLSEDGKMVVKGLEFVRRDWAPIARETQKEVLRILLEEADPEKAARLVRDVIERIRQRRVSLEDITIYTQLTKRIKSYKSLEPHVVAAQKLKERGREVAPGMIIGYIITKGTKGISQRATPVEFARLEDYDPEYYIDNQILPAIQRIFEAIGYTRDYLKEGITQTSLSRWF

SEQ ID NO: 2539 - protein, 792 aa, unidentified
  REGION 1..792: note = Description of Unknown: Synthetic polypeptide
MPRILKGFLIDADFETVEGRALIRLFLRGEEGSFVVYDDSFSPYFYALPGDEPERVKERILASGAAEAIQKVEIEEKRLFGTPRVALRITVSHPQDVPRIRERIRRVEGVDLILEHDILFARRRLIDRGIKPLTWLRLEVEERDGRALLRGVEQLEEEPPELRVAAVAIAVYNPKGAPRSSKDEIIMISVATSDGVEKVLTWREVQGLEQVEVLQDEKEMLLRFAELIKEGDYDVIVGYNTDSFDFPYIRDRLKKLGISLPLGRLDAELEVSRRGALPEARIRGRAHVDLYPIVRRHVKLNSYDLESVVEELLGIKKEKLDGERLFTYWDEGGEKRALLARYALEDARVTLALAEKFLPLYCELSTIVGQSLNDVARMTSGQLVEWLLMRYATPRGELIPNHPAGEEYAARARATYAGGYVREPKRGLVEHIAVFDFRSFGPSIIVSHNIDPSTLIVGNCEENRAPELEYCFSLEREGFIPAILKELIRRRAEIKRELKRSEGDRRRTLSFAEKALKILANSFYGYMGYPRARWYRRECAESVAAFARMYIKQVMRIAEEEFKLEVVYGDTDSLFVVIPPEKRELAQKFLQKVNESMPGIIELEFEGFYRRGLFVTKKRYALLSEDGKMVVKGLEFVRRDWAPIARETQKEVLRILLEEADPEKAARLVRDVIERIRQRRVSLEDITIYTQLTKRIKSYKSLEPHVVAAQKLKERGREVAPGMIIGYIITKGTKGISQRATPVEFARLEDYDPEYYIDNQILPAIQRIFEAIGYTRDYLKEGITQTSLSRWF

SEQ ID NO: 2540 - protein, 774 aa, unidentified
  REGION 1..774: note = Description of Unknown: Synthetic polypeptide
MPRILKGFLIDADFETVEGRALIRLFLRGEEGSFVVYDDSFSPYFYALPGDEPERVKERILASGAAEAIQKVEIEEKRLFGTPRVALRITVSHPQDVPRIRERIRRVEGVDLILEHDILFVRRYLIDRGLLRGVEQLEEEPPELRVAAVAIAVYNPKGAPRSSKDEIIMISVATSDGVEKVLTWREVQGLEQVEVLQDEKEMLLRFAELIKEGDYDVIVGYNTDSFDFPYIRDRLKKLGISLPLGRLDAELEVSRRGALPEARIRGRAHVDLYPIVRRHVKLNSYDLESVVEELLGIKKEKLDGERLFTYWDEGGEKRALLARYALEDARVTLALAEKFLPLYCELSTIVGQSLNDVARMTSGQLVEWLLMRYATPRGELIPNHPAGEEYAARARATYAGGYVREPKRGLVEHIAVFDFRSFGPSIIVSHNIDPSTLIVGNCEENRAPELEYCFSLEREGFIPAILKELIRRRAEIKRELKRSEGDRRRTLSFAEKALKILANSFYGYMGYPRARWYRRECAESVAAFARMYIKQVMRIAEEEFKLEVVYGDTDSLFVVIPPEKRELAQKFLQKVNESMPGIIELEFEGFYRRGLFVTKKRYALLSEDGKMVVKGLEFVRRDWAPIARETQKEVLRILLEEADPEKAARLVRDVIERIRQRRVSLEDITIYTQLTKRIKSYKSLEPHVVAAQKLKERGREVAPGMIIGYIITKGTKGISQRATPVEFARLEDYDPEYYIDNQILPAIQRIFEAIGYTRDYLKEGITQTSLSRWF

SEQ ID NO: 2541 - protein, 792 aa, unidentified
  REGION 1..792: note = Description of Unknown: Synthetic polypeptide
MPRILKGFLIDADFETVEGRALIRLFLRGEEGSFVVYDDSFSPYFYALPGDEPERVKERILASGAAEAIQKVEIEEKRLFGTPRVALRITVSHPQDVPRIRERIRRVEGVDLILELDILFVRRRLIDRGIKPLTWLRLEVEERDGRALLRGVEQLEEEPPELRVAAVAIAVYNPKGAPRSSKDEIIMISVATSDGVEKVLTWREVQGLEQVEVLQDEKEMLLRFAELIKEGDYDVIVGYNTDSFDFPYIRDRLKKLGISLPLGRLDAELEVSRRGALPEARIRGRAHVDLYPIVRRHVKLNSYDLESVVEELLGIKKEKLDGERLFTYWDEGGEKRALLARYALEDARVTLALAEKFLPLYCELSTIVGQSLNDVARMTSGQLVEWLLMRYATPRGELIPNHPAGEEYAARARATYAGGYVREPKRGLVEHIAVFDFRSFGPSIIVSHNIDPSTLIVGNCEENRAPELEYCFSLEREGFIPAILKELIRRRAEIKRELKRSEGDRRRTLSFAEKALKILANSFYGYMGYPRARWYRRECAESVAAFARMYIKQVMRIAEEEFKLEVVYGDTDSLFVVIPPEKRELAQKFLQKVNESMPGIIELEFEGFYRRGLFVTKKRYALLSEDGKMVVKGLEFVRRDWAPIARETQKEVLRILLEEADPEKAARLVRDVIERIRQRRVSLEDITIYTQLTKRIKSYKSLEPHVVAAQKLKERGREVAPGMIIGYIITKGTKGISQRATPVEFARLEDYDPEYYIDNQILPAIQRIFEAIGYTRDYLKEGITQTSLSRWF

SEQ ID NO: 2542 - protein, 792 aa, unidentified
  REGION 1..792: note = Description of Unknown: Synthetic polypeptide
MPRILKGFLIDADFETVEGRALIRLFLRGEEGSFVVYDDSFSPYFYALPGDEPERVKERILASGAAEAIQKVEIEEKRLFGTPRVALRITVSHPQDVPRIRERIRRVEGVDLILEHDILFVRRRLIDRGIKPLTWLRLEVEERDGRALLRGVEQLEEEPPELRVAAVAIAVYNPKGAPRSSKDEIIMISVATSDGVEKVLTWREVQGLEQVEVLQDEKEMLLRFAELIKEGDYDVIVGYNTDSFDFPYIRDRLKKLGISLPLGRLDAELEVSRRRALPEARIRGRAHVDLYPIVRRHVKLNSYDLESVVEELLGIKKEKLDGERLFTYWDEGGEKRALLARYALEDARVTLALAEKFLPLYCELSTIVGQSLNDVARMTSGQLVEWLLMRYATPRGELIPNHPAGEEYAARARATYAGGYVREPKRGLVEHIAVFDFRSFGPSIIVSHNIDPSTLIVGNCEENRAPELEYCFSLEREGFIPAILKELIRRRAEIKRELKRSEGDRRRTLSFAEKALKILANSFYGYMGYPRARWYRRECAESVAAFARMYIKQVMRIAEEEFKLEVVYGDTDSLFVVIPPEKRELAQKFLQKVNESMPGIIELEFEGFYRRGLFVTKKRYALLSEDGKMVVKGLEFVRRDWAPIARETQKEVLRILLEEADPEKAARLVRDVIERIRQRRVSLEDITIYTQLTKRIKSYKSLEPHVVAAQKLKERGREVAPGMIIGYIITKGTKGISQRATPVEFARLEDYDPEYYIDNQILPAIQRIFEAIGYTRDYLKEGITQTSLSRWF

SEQ ID NO: 2543 - protein, 792 aa, unidentified
  REGION 1..792: note = Description of Unknown: Synthetic polypeptide
MPRILKGFLIDADFETVEGRALIRLFLRGEEGSFVVYDDSFSPYFYALPGDEPERVKERILASGAAEAIQKVEIEEKRLFGTPRVALRITVSHPQDVPRIRERIRRVEGVDLILEHDILFVRRYLIDRGIKPLTWLRLEVEERDGRALLRGVEQLEEEPPELRVAAVAIAVYNPKGAPRSSKDEIIMISVATSDGVEKVLTWREVQGLEQVEVLQDEKEMLLRFAELIKEGDYDVIVGYNTDSFDFPYIRDRLKKLGISLPLGRLDAELEVSRRGALPEARIRGRAHVDLYPIVRRHVKLNSYDLESVVEELLGIKKEKLDGERLFTYWDEGGEKRALLARYALEDARVTLALAEKFLPLYCELSTIVGQSLNDVARMTSGQLVEWLLMRYATPRGELIPNHPAGEEYAARARATYAGGYVREPKRGLVEHIAVFDFRSFGPSIIVSHNIDPSTLIVGNCEENRAPELEYCFSLEREGFIPAILKELIRRRAEIKRELKRSEGDRRRTLSFAEKALKILANSFYGYMGYPRARWYRRECAESVAAFARMYIKQVMRIAEEEFKLEVVYGDTDSLFVVIPPEKRELAQKFLQKVNESMPGIIELEFEGFYRRGLFVTKKRYALLSEDGKMVVKGLEFVRRDWAPIARETQKEVLRILLEEADPESAARLVRDVIERIRQRRVSLEDITIYTQLTKRIKSYKSLEPHVVAAQKLKERGREVAPGMIIGYIITKGTKGISQRATPVEFARLEDYDPEYYIDNQILPAIQRIFEAIGYTRDYLKEGITQTSLSRWF

SEQ ID NO: 2544 - protein, 792 aa, unidentified
  REGION 1..792: note = Description of Unknown: Synthetic polypeptide
MPRILKGFLIDADFETVEGRALIRLFLRGEEGSFVVYDDSFSPYFYALPGDEPERVKERILASGAAEAIQKVEIEEKRLFGTPRVALRITVSHPQDVPRIRERIRRVEGVDLILEHDILFVRRRLIDRGIKPLTWLRLEVEERDGRALLRGVEQLEEEPPELRVAAVAIAVYNPKGAPRSSKDEIIMISVATSDGVEKVLTWREVQGLEQVEVLQDEKEMLLRFAELIKEGDYDVIVGYNTDSFDFPYIRDRLKKLGISLPLGRLDAELEVSRRGALPEARIRGRAHVDLYPIVRRHVKLNSYDLESVVEELLGIKKEKLDGERLFTYWDEGGEKRALLARYALEDARVTLALAEKFLPLYCELSTIVGQSLNDVARMTSGQLVEWLLMRYATPRGELIPNHPAGEEYAARARATYAGGYVREPKRGLVEHIAVFDFRSFGPSIIVSHNIDPSRLIVGNCEENRAPELEYCFSLEREGFIPAILKELIRRRAEIKRELKRSEGDRRRTLSFAEKALKILANSFYGYMGYPRARWYRRECAESVAAFARMYIKQVMRIAEEEFKLEVVYGDTDSLFVVIPPEKRELAQKFLQKVNESMPGIIELEFEGFYRRGLFVTKKRYALLSEDGKMVVKGLEFVRRDWAPIARETQKEVLRILLEEADPEKAARLVRDVIERIRQRRVSLEDITIYTQLTKRIKSYKSLEPHVVAAQKLKERGREVAPGMIIGYIITKGTKGISQRATPVEFARLEDYDPEYYIDNQILPAIQRIFEAIGYTRDYLKEGITQTSLSRWF

SEQ ID NO: 2545 - protein, 792 aa, unidentified
  REGION 1..792: note = Description of Unknown: Synthetic polypeptide
MPRILKGFLIDADFETVEGRALIRLFLRGEEGSFVVYDDSFSPYFYALPGDEPERVKERILASGAAEAIQKVEIEEKRLFGTPRVALRITVSHPQDVPRIRERIRRVEGVDLILEHDILFVRRYLIDRGIKPLTWLRLEVEERDGRALLRGVEQLEEEPPELRVAAVAIAVYNPKGAPRSSKDEIIMISVATSDGVEKVLTWREVQGLEQVEVLQDEKEMLLRFAELIKEGDYDVIVGYNTDSFDFPYIRDRLKKLGISLPLGRLDAELEVSRRGALPEARIRGRAHVDLYPIVRRHVKLNSYILESVVEELLGIKKEKLDGERLFTYWDEGGEKRALLARYALEDARVTLALAEKFLPLYCELSTIVGQSLNDVARMTSGQLVEWLLMRYATPRGELIPNHPAGEEYAARARATYAGGYVREPKRGLVEHIAVFDFRSFGPSIIVSHNIDPSTLIVGNCEENRAPELEYCFSLEREGFIPAILKELIRRRAEIKRELKRSEGDRRRTLSFAEKALKILANSFYGYMGYPRARWYRRECAESVAAFARMYIKQVMRIAEEEFKLEVVYGDTDSLFVVIPPEKRELAQKFLQKVNESMPGIIELEFEGFYRRGLFVTKKRYALLSEDGKMVVKGLEFVRRDWAPIARETQKEVLRILLEEADPEKAARLVRDVIERIRQRRVSLEDITIYTQLTKRIKSYKSLEPHVVAAQKLKERGREVAPGMIIGYIITKGTKGISQRATPVEFARLEDYDPEYYIDNQILPAIQRIFEAIGYTRDYLKEGITQTSLSRWF

SEQ ID NO: 2546 - protein, 792 aa, unidentified
  REGION 1..792: note = Description of Unknown: Synthetic polypeptide
MPRILKGFLIDADFETVEGRALIRLFLRGEEGSFVVYDDSFSPYFYALPGDEPERVKERILASGAAEAIQKVEIEEKRLFGTPRVALRITVSHPQDVPRIRERIRRVEGVDLILEHDILFVRRRLIDRGIKPLTWLRLEVEERDGRALLRGVEQLEEEPPELRVAAVAIAVYNPKGAPRSSKDEIIMISVATSDGVEKVLTWREVQGLEQVEVLQDEKEMLLRFAELIKEGDYDVIVGYNTDSFDFPYIRDRLKKLGISLPLGRLDAELEVSRRGALPEARIRGRAHVDLYPIVRRHVKLNSYDLESVVEELLGIKKEKLDGERLFTYWDEGGEKRALLARYALEDARVTLALAEKFLPLYCELSTIVGQSLNDVARMTSGQLVEWLLMRYATPRGELIPNHPAGEEYAARARATYAGGYVREPKRGLVEHIAVFDFRSFGPSIIVSHNIDPSTLIVGNCEENRAPELEYCFSLEREGFIPAILKELIRRRAEIKRELKRSEGDRRRTLSFAEKALKILANSFYGYMGYPRARWYRRECAESVAAFARMYIKQVMRIAEEEFKLEVVYGDTDSLFVVIPPEKRELAQKFLQKVNESMPGIIELEFEGFYRRGLFVTKKRYALLSEDGKMVVKGLEFVRRDWAPIARETQKEVLRILLEEADPEKAARLVRRVIERIRQRRVSLEDITIYTQLTKRIKSYKSLEPHVVAAQKLKERGREVAPGMIIGYIITKGTKGISQRATPVEFARLEDYDPEYYIDNQILPAIQRIFEAIGYTRDYLKEGITQTSLSRWF

SEQ ID NO: 2547 - protein, 792 aa, unidentified
  REGION 1..792: note = Description of Unknown: Synthetic polypeptide
MPRILKGFLIDADFETVEGRALIRLFLRGEEGSFVVYDDSFSPYFYALPGDEPERVKERILASGAAEAIQKVEIEEKRLFGTPRVALRITVSHPQDVPRIRERIRRVEGVDLILEHDILFVRRRLIDRGIKPLTWLRLEVEERDGRALLRGVEQLEEEPPELRVAAVAIAVYNPKGAPRSSKDEIIMISVATSDGVEKVLTWREVQGLEQVEVLQDEKEMLLRFAELIKEGDYDVIVGYNTDSFDFPYIRDRLKKLGISLPLGRLDAEPEVSRRGALPEARIRGRAHVDLYPIVRRHVKLNSYDLESVVEELLGIKKEKLDGERLFTYWDEGGEKRALLARYALEDARVTLALAEKFLPLYCELSTIVGQSLNDVARMTSGQLVEWLLMRYATPRGELIPNHPAGEEYAARARATYAGGYVREPKRGLVEHIAVFDFRSFGPSIIVSHNIDPSTLIVGNCEENRAPELEYCFSLEREGFIPAILKELIRRRAEIKRELKRSEGDRRRTLSFAEKALKILANSFYGYMGYPRARWYRRECAESVAAFARMYIKQVMRIAEEEFKLEVVYGDTDSLFVVIPPEKRELAQKFLQKVNESMPGIIELEFEGFYRRGLFVTKKRYALLSEDGKMVVKGLEFVRRDWAPIARETQKEVLRILLEEADPEKAARLVRDVIERIRQRRVSLEDITIYTQLTKRIKSYKSLEPHVVAAQKLKERGREVAPGMIIGYIITKGTKGISQRATPVEFARLEDYDPEYYIDNQILPAIQRIFEAIGYTRDYLKEGITQTSLSRWF

SEQ ID NO: 2548 - protein, 792 aa, unidentified
  REGION 1..792: note = Description of Unknown: Synthetic polypeptide
MPRILKGFLIDADFETVEGRALIRLFLRGEEGSFVVYDDSFSPYFYALPGDEPERVKERILASGAAEAIQKVEIEEKRLFGTPRVALRITVSHPQDVPRIRERIRRVEGVDLILEHDILFVRRRLIDRGIKPLTWLRLEVEERDGRALLRGVEQLEEEPPELRVAAVAIAVYNPKGAPRSSKDEIIMISVATSDGVEKVLTWREVQGLEQVEVLQDEKEMLLRFAELIKEGDYDVIVGYNTDSFDFPYIRDRLKKLGISLPLGRLDAELEVSRRGALPEARIRGRAHVDLYPIVRRHVKLNSYDLESVVEELLGIKKEKLDGERLFTYWNEGGEKRALLARYALEDARVTLALAEKFLPLYCELSTIVGQSLNDVARMTSGQLVEWLLMRYATPRGELIPNHPAGEEYAARARATYAGGYVREPKRGLVEHIAVFDFRSFGPSIIVSHNIDPSTLIVGNCEENRAPELEYCFSLEREGFIPAILKELIRRRAEIKRELKRSEGDRRRTLSFAEKALKILANSFYGYMGYPRARWYRRECAESVAAFARMYIKQVMRIAEEEFKLEVVYGDTDSLFVVIPPEKRELAQKFLQKVNESMPGIIELEFEGFYRRGLFVTKKRYALLSEDGKMVVKGLEFVRRDWAPIARETQKEVLRILLEEADPEKAARLVRDVIERIRQRRVSLEDITIYTQLTKRIKSYKSLEPHVVAAQKLKERGREVAPGMIIGYIITKGTKGISQRATPVEFARLEDYDPEYYIDNQILPAIQRIFEAIGYTRDYLKEGITQTSLSRWF

SEQ ID NO: 2549 - protein, 792 aa, unidentified
  REGION 1..792: note = Description of Unknown: Synthetic polypeptide
MPRILKGFLIDADFETVEGRALIRLFLRGEEGSFVVYDDSFSPYFYALPGDEPERVKERILASGAAEAIQKVEIEEKRLFGTPRVALRITVSHPQDVPRIRERIRRVEGVDLILEYDILFVRRRLIDRGIKPLTWLRLEVEERDGRALLRGVEQLEEEPPELRVAAVAIAVYNPKGAPRSSKDEIIMISVATSDGVEKVLTWREVQGLEQVEVLQDEKEMLLRFAELIKEGDYDVIVGYNTDSFDFPYIRDRLKKLGISLPLGRLDAELEVSRRGALPEARIRGRAHVDLYPIVRRHVKLNSYDLESVVEELLGIKKEKLDGERLFTYWDEGGEKRALLARYALEDARVTLALAEKFLPLYCELSTIVGQSLNDVARMTSGQLVEWLLMRYATPRGELIPNHPAGEEYAARARATYAGGYVREPKRGLVEHIAVFDFRSFGPSIIVSHNIDPSTLIVGNCEENRAPELEYCFSLEREGFIPAILKELIRRRAEIKRELKRSEGDRRRTLSFAEKALKILANSFYGYMGYPRARWYRRECAESVAAFARMYIKQVMRIAEEEFKLEVVYGDTDSLFVVIPPEKRELAQKFLQKVNESMPGIIELEFEGFYRRGLFVTKKRYALLSEDGKMVVKGLEFVRRDWAPIARETQKEVLRILLEEADPEKAARLVRDVIERIRQRRVSLEDITIYTQLTKRIKSYKSLEPHVVAAQKLKERGREVAPGMIIGYIITKGTKGISQRATPVEFARLEDYDPEYYIDNQILPAIQRIFEAIGYTRDYLKEGITQTSLSRWF

SEQ ID NO: 2550 - protein, 792 aa, unidentified
  REGION 1..792: note = Description of Unknown: Synthetic polypeptide
MPRILKGFLIDADFETVEGRALIRLFLRGEEGSFVVYDDSFSPYFYALPGDEPERVKERILASGAAEAIQKVEIEEKRLFGTPRVALRITVSHPQDVPRIRERIRRVEGVDLILEHDILFVRRRLIDRGIKPLTWLRLEVEERDGRALLRGVEQLEEEPPELRVAAVAIAVYNPKGAPRSSKDEIIMISVATSDGVEKVLTWREIQGLEQVEVLQDEKEMLLRFAELIKEGDYDVIVGYNTDSFDFPYIRDRLKKLGISLPLGRLDAELEVSRRGALPEARIRGRAHVDLYPIVRRHVKLNSYDLESVVEELLGIKKEKLDGERLFTYWDEGGEKRALLARYALEDARVTLALAEKFLPLYCELSTIVGQSLNDVARMTSGQLVEWLLMRYATPRGELIPNHPAGEEYAARARATYAGGYVREPKRGLVEHIAVFDFRSFGPSIIVSHNIDPSTLIVGNCEENRAPELEYCFSLEREGFIPAILKELIRRRAEIKRELKRSEGDRRRTLSFAEKALKILANSFYGYMGYPRARWYRRECAESVAAFARMYIKQVMRIAEEEFKLEVVYGDTDSLFVVIPPEKRELAQKFLQKVNESMPGIIELEFEGFYRRGLFVTKKRYALLSEDGKMVVKGLEFVRRDWAPIARETQKEVLRILLEEADPEKAARLVRDVIERIRQRRVSLEDITIYTQLTKRIKSYKSLEPHVVAAQKLKERGREVAPGMIIGYIITKGTKGISQRATPVEFARLEDYDPEYYIDNQILPAIQRIFEAIGYTRDYLKEGITQTSLSRWF

SEQ ID NO: 2551 - protein, 782 aa, unidentified
  REGION 1..782: note = Description of Unknown: Synthetic polypeptide
MPRILKGFLIDADFETVEGRALIRLFLRGEEGSFVVYDDSFSPYFYALPGDEPERVKERILASGAAEAIQKVEIEEKRLFGTPRVALRITVSHPQDVPRIRERIRRVEGVDLILEHDILFVRRYLIDRGIKPLTWLRLLRGVEQLEEEPPELRVAAVAIAVYNPKGAPRSSKDEIIMISVATSDGVEKVLTWREVQGLEQVEVLQDEKEMLLRFAELIKEGDYDVIVGYNTDSFDFPYIRDRLKKLGISLPLGRLDAELEVSRRGALPEARIRGRAHVDLYPIVRRHVKLNSYDLESVVEELLGIKKEKLDGERLFTYWDEGGEKRALLARYALEDARVTLALAEKFLPLYCELSTIVGQSLNDVARMTSGQLVEWLLMRYATPRGELIPNHPAGEEYAARARATYAGGYVREPKRGLVEHIAVFDFRSFGPSIIVSHNIDPSTLIVGNCEENRAPELEYCFSLEREGFIPAILKELIRRRAEIKRELKRSEGDRRRTLSFAEKALKILANSFYGYMGYPRARWYRRECAESVAAFARMYIKQVMRIAEEEFKLEVVYGDTDSLFVVIPPEKRELAQKFLQKVNESMPGIIELEFEGFYRRGLFVTKKRYALLSEDGKMVVKGLEFVRRDWAPIARETQKEVLRILLEEADPEKAARLVRDVIERIRQRRVSLEDITIYTQLTKRIKSYKSLEPHVVAAQKLKERGREVAPGMIIGYIITKGTKGISQRATPVEFARLEDYDPEYYIDNQILPAIQRIFEAIGYTRDYLKEGITQTSLSRWF

SEQ ID NO: 2552 - protein, 792 aa, unidentified
  REGION 1..792: note = Description of Unknown: Synthetic polypeptide
MPRILKGFLIDADFETVEGRALIRLFLRGEEGSFVVYDDSFSPYFYALPGDEPERVKERILASGAAEAIQKVEIEEKRLFGTPRVALRITVSHPQDVPRIRERIRRVEGVDLILEHDILFVRRRLIDRGIKPLTWLRLEVEERDGRALLRGVEQLEEEPPELRVAAVAIAVYNPKGAPRSSKDEIIMISVATSDGVEKVLTWREVQGLEQVEVLQDEKEMLLRFAELIKEGDYDVIVGYNTDSFDFPYIRDRLKKLGISLPLGRLDAELEVSRRGALPEARIRGRAHVDLYPIVRRHVKLNSYDLESVVEELLGIKKEKLDGERLFTYWDEGGEKRALLARYALEDARVTLALAEKFLPLYCELSTIVGQSLNDVARMTSGQLVEWLLMRYATPRGELIPNHPAGEEYAARARATYAGGYVREPKRGLVEHIAVFDFRSFGPSIIVSHNIDPSTLIVGNCEENRAPELEYCFSLEREGFIPAILKELIRRRAEIKRELKRSEGDRRRTLSFAEKALKILANSFYGYMGYPRARWYRRECAESVAAFARMYIKQVMRIAEEEFKLEVVYGDTDSLFVVIPPEKRELAQKFLQKVNESMPGIIELEFEGFYRRGFFVTKKRYALLSEDGKMVVKGLEFVRRDWAPIARETQKEVLRILLEEADPEKAARLVRDVIERIRQRRVSLEDITIYTQLTKRIKSYKSLEPHVVAAQKLKERGREVAPGMIIGYIITKGTKGISQRATPVEFARLEDYDPEYYIDNQILPAIQRIFEAIGYTRDYLKEGITQTSLSRWF

SEQ ID NO: 2553 - protein, 792 aa, unidentified
  REGION 1..792: note = Description of Unknown: Synthetic polypeptide
MPRILKGFLIDADFETVEGRALIRLFLRGEEGSFVVYDDSFSPYFYALPGDEPERVKERILASGAAEAIQKVEIEEKRLFGTPRVALRITVSHPQDVPRIRERIRRVEGVDLILEHDILFVRRRLIDRGIKPLTWLRLEVEERDGRALLRGVEQLEEEPPELRVAAVAIAVYNPKGAPRSSKDEIIMISVATSDGVEKVLTWREVQGLEQVEVLQDEKEMLLRFAELIKEGDYDVIVGYNTDSFDFPYIRDRLKKLGISLPLGRLDAELEVSRRGALPEARIRGRAHVDLYPIVRRHVKLNSYDLESVVEELLGIKKEKLDGERLFTYWDEGGEKRALLARYALEDARVTLALAEKFLPLYCELSTIVGQSLNDVARMTSGQLVEWLLMRYATPRGELIPNHPAGEEYAARARATYAGGYVREPKRGLVEHIAVFDFRSFGPSIIVSHNIDPSTLIVGNCEENRAPELEYCFSLEREGFIPAILKELIRRRAEIKRELKRSEGDRRRTLSFAEKALKILANSFYGYMGYPRARWYRRECAESVAAFARMYIKQVMRIAEEEFKLEVVYGDTDSLFVVIPPEKRELAQKFLQKVNESMPGIIELEFEGFYRRGLFVTKKRYALLSEDGKMVVKGLEFVRRDWAPIARETQKEVLRILLEEADPEKAARLVRDVIERIRQRRVSLEDITIYTQLTKRIKSYKSLEPHVVAAQKLKERGREVAPGMIIGYIVTKGTKGISQRATPVEFARLEDYDPEYYIDNQILPAIQRIFEAIGYTRDYLKEGITQTSLSRWF

SEQ ID NO: 2554 - protein, 792 aa, unidentified
  REGION 1..792: note = Description of Unknown: Synthetic polypeptide
MPRILKGFLIDADFETVEGRALIRLFLRGEEGSFVVYDDSFSPYFYALPGDEPERVKERILASGAAEAIQKVEIEEKRLFGTPRVALRITVSHPQDVPRIRERIRRVEGVDLILEHDILFVRRRLIDRGIKPLTWLRLEVEERDGRALLRGVEQLEEEPPELRVAAVAIAVYNPKGAPRSSKDEIIMISVATSDGVEKVLTWREVQGLEQVEVLQDEKEMLLRFAELIKEGDYDVIVGYNTDSFDFPYIRDRLKKLGISLPLGRLDAELEVSRRGALPEARIRGRAHVDLYPIVRRHVKLNSYDLESVVEELLGIKKEKLDGERLFTYWDEGGEKRALLARYALEDARVTLALAEKFLPLYCELSTIVGQSLNDVARMTSGQLVEWLLMRYATPRGELIPNHPAGEEYAARARATYAGGYVREPKRGLVEHIAVFDFRSFGPSIIVSHNIDPSTLIVGNCEENRAPELEYCFSLEREGFIPAILKELIRRRAEIKRELKRSEGDRRRTLSFAEKALKILANSFYGYMGYPRARWYRRECAESVAAFARMYIKQVMRIAEEEFKLEVVYGDTDSLFVVIPPEKRELAQKFLQKINESMPGIIELEFEGFYRRGLFVTKKRYALLSEDGKMVVKGLEFVRRDWAPIARETQKEVLRILLEEADPEKAARLVRDVIERIRQRRVSLEDITIYTQLTKRIKSYKSLEPHVVAAQKLKERGREVAPGMIIGYIITKGTKGISQRATPVEFARLEDYDPEYYIDNQILPAIQRIFEAIGYTRDYLKEGITQTSLSRWF

SEQ ID NO: 2555 - protein, 792 aa, unidentified
  REGION 1..792: note = Description of Unknown: Synthetic polypeptide
MPRILKGFLIDADFETVEGRALIRLFLRGEEGSFVVYDDSFSPYFYALPGDEPERVKERILASGAAEAIQKVEIEEKRLFGTPRVALRITVSHPQDVPRIRERIRRVEGVDLILEHDILFVRRRLIDRGIKPLTWLRLEVEERDGRALLRGVEQLEEEPPELRVAAVAIAVYNPKGAPRSSKDEIIMISVATSDGVEKVLTWREVQGLEQVEVLQDEKEMLLRFAELIKEGDYDVIVGYNTDSFDFPYIRDRLKKLGISLPLGRLDAELEVSRRGALPEARIRGRAHVDLYPIVRRHIKLNSYVLESVVEELLGIKKEKLDGERLFTYWDEGGEKRALLARYALEDARVTLALAEKFLPLYCELSTIVGQSLNDVARMTSGQLVEWLLMRYATPRGELIPNHPAGEEYAARARATYAGGYVREPKRGLVEHIAVFDFRSFGPSIIVSHNIDPSTLIVGNCEENRAPELEYCFSLEREGFIPAILKELIRRRAEIKRELKRSEGDRRRTLSFAEKALKILANSFYGYMGYPRARWYRRECAESVAAFARMYIKQVMRIAEEEFKLEVVYGDTDSLFVVIPPEKRELAQKFLQKVNESMPGIIELEFEGFYRRGLFVTKKRYALLSEDGKMVVKGLEFVRRDWAPIARETQKEVLRILLEEADPEKAARLVRDVIERIRQRRVSLEDITIYTQLTKRIKSYKSLEPHVVAAQKLKERGREVAPGMIIGYIITKGTKGISQRATPVEFARLEDYDPEYYIDNQILPAIQRIFEAIGYTRDYLKEGITQTSLSRWF

SEQ ID NO: 2556 - protein, 792 aa, unidentified
  REGION 1..792: note = Description of Unknown: Synthetic polypeptide
MPRILKGFLIDADFETVEGRALIRLFLRGEEGSFVVYDDSFSPYFYALPGDEPERVKERILASGAAEAIQKVEIEEKRLFGTPRVALRITVSHPQDVPRIRERIRRVEGVDLILEHDILFVRRRLIDRGIKPLTWLRLEVEERDGRALLRGVEQLEEEPPELRVAAVAIAVYNPKGAPRSSKDEIIMISVATSDGVEKVLTWREVQGLEQVEVLQDEKEMLLRFAELIKEGDYDVIVGYNTDSFDFPYIRDRLKKLGISLPLGRLDAELEVSRRGALPEARIRGRAHVDLYPIVRRHVKLNSYDLESVYEELLGIKKEKLDGERLFTYWDEGGEKRALLARYALEDARVTLALAEKFLPLYCELSTIVGQSLNDVARMTSGQLVEWLLMRYATPRGELIPNHPAGEEYAARARATYAGGYVREPKRGLVEHIAVFDFRSFGPSIIVSHNIDPSTLIVGNCEENRAPELEYCFSLEREGFIPAILKELIRRRAEIKRELKRSEGDRRRTLSFAEKALKILANSFYGYMGYPRARWYRRECAESVAAFARMYIKQVMRIAEEEFKLEVVYGDTDSLFVVIPPEKRELAQKFLQKVNESMPGIIELEFEGFYRRGLFVTKKRYALLSEDGKMVVKGLEFVRRDWAPIARETQKEVLRILLEEADPEKAARLVRDVIERIRQRRVSLEDITIYTQLTKRIKSYKSLEPHVVAAQKLKERGREVAPGMIIGYIITKGTKGISQRATPVEFARLEDYDPEYYIDNQILPAIQRIFEAIGYTRDYLKEGITQTSLSRWF

SEQ ID NO: 2557 - protein, 792 aa, unidentified
  REGION 1..792: note = Description of Unknown: Synthetic polypeptide
MPRILKGFLIDADFETVEGRALIRLFLRGEEGSFVVYDDSFSPYFYALPGDEPERVKERILASGAAEAIQKVEIEEKRLFGTPRRALRITVSHPQDVPRIRERIRRVEGVDLILEHDILFVRRRLIDRGIKPLTWLRLEVEERDGRALLRGVEQLEEEPPELRVAAVAIAVYNPKGAPRSSKDEIIMISVATSDGVEKVLTWREVQGLEQVEVLQDEKEMLLRFAELIKEGDYDVIVGYNTDSFDFPYIRDRLKKLGISLPLGRLDAELEVSRRGALPEARIRGRAHVDLYPIVRRHVKLNSYDLESVVEELLGIKKEKLDGERLFTYWDEGGEKRALLARYALEDARVTLALAEKFLPLYCELSTIVGQSLNDVARMTSGQLVEWLLMRYATPRGELIPNHPAGEEYAARARATYAGGYVREPKRGLVEHIAVFDFRSFGPSIIVSHNIDPSTLIVGNCEENRAPELEYCFSLEREGFIPAILKELIRRRAEIKRELKRSEGDRRRTLSFAEKALKILANSFYGYMGYPRARWYRRECAESVAAFARMYIKQVMRIAEEEFKLEVVYGDTDSLFVVIPPEKRELAQKFLQKVNESMPGIIELEFEGFYRRGLFVTKKRYALLSEDGKMVVKGLEFVRRDWAPIARETQKEVLRILLEEADPEKAARLVRDVIERIRQRRVSLEDITIYTQLTKRIKSYKSLEPHVVAAQKLKERGREVAPGMIIGYIITKGTKGISQRATPVEFARLEDYDPEYYIDNQILPAIQRIFEAIGYTRDYLKEGITQTSLSRWF

SEQ ID NO: 2558 - protein, 792 aa, unidentified
  REGION 1..792: note = Description of Unknown: Synthetic polypeptide
MPRILKGFLIDADFETVEGRALIRLFLRGEEGSFVVYDDSFSPYFYALPGDEPERVKERILASGAAEAIQKVEIEEKRLFGTPRVALRITVSHPQDVPRIRERIRRVEGVDLILEHDILFVRRRLIDRGIKPLTWLRLEVEERDGRALLRGVEQLEEEPPELRVAAVAIAVYNPKGAPRSSKDEIIMISVATSDGVEKVLTWREVQGLEQVEVLQDEKEMLLRFAELIKEGDYDVIVGYNTDSFDFPYIRDRLKKLGISLPLGRLDAELEVSRRGALPEARIRGRAHVDLYRIVRRHVKLNSYDLESVVEELLGIKKEKLDGERLFTYWDEGGEKRALLARYALEDARVTLALAEKFLPLYCELSTIVGQSLNDVARMTSGQLVEWLLMRYATPRGELIPNHPAGEEYAARARATYAGGYVREPKRGLVEHIAVFDFRSFGPSIIVSHNIDPSTLIVGNCEENRAPELEYCFSLEREGFIPAILKELIRRRAEIKRELKRSEGDRRRTLSFAEKALKILANSFYGYMGYPRARWYRRECAESVAAFARMYIKQVMRIAEEEFKLEVVYGDTDSLFVVIPPEKRELAQKFLQKVNESMPGIIELEFEGFYRRGLFVTKKRYALLSEDGKMVVKGLEFVRRDWAPIARETQKEVLRILLEEADPEKAARLVRDVIERIRQRRVSLEDITIYTQLTKRIKSYKSLEPHVVAAQKLKERGREVAPGMIIGYIITKGTKGISQRATPVEFARLEDYDPEYYIDNQILPAIQRIFEAIGYTRDYLKEGITQTSLSRWF

SEQ ID NO: 2559 - protein, 776 aa, unidentified
  REGION 1..776: note = Description of Unknown: Synthetic polypeptide
MPRILKGFLIDADFETVEGRALIRLFLRGEEGSFVVYDDSFSPYFYALPGDEPERVKERILASGAAEAIQKVEIEEKRLFGTPRVALRITVSHPQDVPRIRERIRRVEGVDLILEHDILFVRRYLIDRGRALLRGVEQLEEEPPELRVAAVAIAVYNPKGAPRSSKDEIIMISVATSDGVEKVLTWREVQGLEQVEVLQDEKEMLLRFAELIKEGDYDVIVGYNTDSFDFPYIRDRLKKLGISLPLGRLDAELEVSRRGALPEARIRGRAHVDLYPIVRRHVKLNSYDLESVVEELLGIKKEKLDGERLFTYWDEGGEKRALLARYALEDARVTLALAEKFLPLYCELSTIVGQSLNDVARMTSGQLVEWLLMRYATPRGELIPNHPAGEEYAARARATYAGGYVREPKRGLVEHIAVFDFRSFGPSIIVSHNIDPSTLIVGNCEENRAPELEYCFSLEREGFIPAILKELIRRRAEIKRELKRSEGDRRRTLSFAEKALKILANSFYGYMGYPRARWYRRECAESVAAFARMYIKQVMRIAEEEFKLEVVYGDTDSLFVVIPPEKRELAQKFLQKVNESMPGIIELEFEGFYRRGLFVTKKRYALLSEDGKMVVKGLEFVRRDWAPIARETQKEVLRILLEEADPEKAARLVRDVIERIRQRRVSLEDITIYTQLTKRIKSYKSLEPHVVAAQKLKERGREVAPGMIIGYIITKGTKGISQRATPVEFARLEDYDPEYYIDNQILPAIQRIFEAIGYTRDYLKEGITQTSLSRWF

SEQ ID NO: 2560 - protein, 792 aa, unidentified
  REGION 1..792: note = Description of Unknown: Synthetic polypeptide
MPRILKGFLIDADFETVEGRALIRLFLRGEEGSFVVYDDSFSPYFYALPGDEPERVKERILASGAAEAIQKVEIEEKRLFGTPRVALRITVSHPQDVPRIRERIRRVEGVDLILEHDILFVRRYLIDRGIKPLTWLRLEVEERDGRALLRGVEQLEEEPPELRVAAVAIAVYNPKGAPRSSKDEIIMISVATSDGVEKVLTWREVQGLEQVEVLQDEKEMLLRFAELIKEGDYDVIVGYNTDSFDFPYIRDRLKKLGISLPLGRLDAELEVSRRGALPEARIRGRAHVDLYPIVRRHVKLNSYMLESVVEELLGIKKEKLDGERLFTYWDEGGEKRALLARYALEDARVTLALAEKFLPLYCELSTIVGQSLNDVARMTSGQLVEWLLMRYATPRGELIPNHPAGEEYAARARATYAGGYVREPKRGLVEHIAVFDFRSFGPSIIVSHNIDPSTLIVGNCEENRAPELEYCFSLEREGFIPAILKELIRRRAEIKRELKRSEGDRRRTLSFAEKALKILANSFYGYMGYPRARWYRRECAESVAAFARMYIKQVMRIAEEEFKLEVVYGDTDSLFVVIPPEKRELAQKFLQKVNESMPGIIELEFEGFYRRGLFVTKKRYALLSEDGKMVVKGLEFVRRDWAPIARETQKEVLRILLEEADPEKAARLVRDVIERIRQRRVSLEDITIYTQLTKRIKSYKSLEPHVVAAQKLKERGREVAPGMIIGYIITKGTKGISQRATPVEFARLEDYDPEYYIDNQILPAIQRIFEAIGYTRDYLKEGITQTSLSRWF

SEQ ID NO: 2561 - protein, 792 aa, unidentified
  REGION 1..792: note = Description of Unknown: Synthetic polypeptide
MPRILKGFLIDADFETVEGRALIRLFLRGEEGSFVVYDDSFSPYFYALPGDEPERVKERILASGAAEAIQKVEIEEKRLFGTPRVALRITVSHPQDVPRIRERIRRVEGVDLILEHDILFVRRRLIDRGIKPLTWLRLEVEERDGRALLRGVEQLEEEPPELRVAAVAIAVYNPKGAPRSSKDEIIMISVATSDGVEKVLTWREVQGLEQVEVLQDEKEMLLRFAELIKEGDYDVIVGYNTDSFDFPYIRDRLKKLGISLPLGRLDAELEVSRRGALPEARIRGRAHVDLYPIVRRHVKLNSYDLESVVEELLGIKKEKLDGERLFTYWDEGGEKRALLARYALEDARVTLALAEKFLPLYCELSTIVGQSLNDVARMTSGQLVEWLLMRYATPRGELIPNHPAGEEYAARARATYAGGYVREPKRGLVEHIAVFDFRSFGPSIIVSHNIDPSTLIVGNCEENRAPELEYCFSLEREGFIPAILKELIRRRAEIKRELKRSEGDRRRTLSFAEKALKILANSFYGYMGYPRARWYRRECAESVAAFARMYIKQVMRIAEEEFKLEVVYGDTDSLFVVIPPEKRELAQKFLQKVNESMPGIIELEFEGFYRRGLFVTKKRYALLSEDGKMVVKGLEFVRRDWAPIARETQKEVLRILLEEADPEKAARLVRDVIERIRQRRVSLEDITIYTQLTKRIKSYKSLEPHVVAAQKLKERGREVAPGMVIGYIITKGTKGISQRATPVEFARLEDYDPEYYIDNQILPAIQRIFEAIGYTRDYLKEGITQTSLSRWF

SEQ ID NO: 2562 - protein, 792 aa, unidentified
  REGION 1..792: note = Description of Unknown: Synthetic polypeptide
MPRILKGFLIDADFETVEGRALIRLFLRGEEGSFVVYDDSFSPYFYALPGDEPERVKERILASGAAEAIQKVEIEEKRLFGTPRVALRITVSHPQDVPRIRERIRRVEGVDLILEHDILFVRRRLIDRGIKPLTWLRLEVEERDGRALLRGVEQLEEEPPELRVAAVAIAVYNPKGAPRSSKDEIIMISVATSDGVEKVLTWREVQGLEQVEVLQDEKEMLLRFAELIKEGDYDVIVGYNTDSFDFPYIRDRLKKLGISLPLGRLDAELEVSRRGALPEARIRGRAHVDLYPIVRRHVKLNSYDLESVVEELLGIKKEKLDGERLFTYWDEGGEKRALLARYALEDARVTLALAEKFLPLYCELSTIVGQSLNDVARMTSGQLVEWLLMRYATPRGELIPNHPAGEEYAARARATYAGGYVREPKRGLVEHIAVFDFRSFGPSIIVSHNIDPSTLIVGNCEENRAPELEYCFSLEREGFIPAILKELIRRRAEIKRELKRSEGDRRRTLSFAEKALKILANSFYGYMGYPRARWYRRECAESVAAFARMYIKQVMRIAEEEFKLEVVYGDTDSLFVVIPPEKRELAQKFLQKVNESMPGIIELEFEGFYRRGLFVTKKRYALLSEDGKMVVKGLEFVRRDWAPIARETQKEVLRALLEEADPEKAARLVRDVIERIRQRRVSLEDITIYTQLTKRIKSYKSLEPHVVAAQKLKERGREVAPGMIIGYIITKGTKGISQRATPVEFARLEDYDPEYYIDNQILPAIQRIFEAIGYTRDYLKEGITQTSLSRWF

SEQ ID NO: 2563 - protein, 792 aa, unidentified
  REGION 1..792: note = Description of Unknown: Synthetic polypeptide
MPRILKGFLIDADFETVEGRALIRLFLRGEEGSFVVYDDSFSPYFYALPGDEPERVKERILASGAAEAIQKVEIEEKRLFGTPRVALRITVSHPQDVPRIRERIRRVEGVDLILEHDILFVRRYLIDRGIKPLTWLRLEVEERDGRALLRGVEQLEEEPPELRVAAVAIAVYNPKGAPRSSKDEIIMISVATSDGVEKVLTWREVQGLEQVEVLQDEKEMLLRFAELIKEGDYDVIVGYNTDSFDFPYIRDRLKKLGISLPLGRLDAELEVSRRGALPEARIRGRAHVDLYPIVRRHVKLNSYDLESVVEELLGIKKEKLDGERLFTYWDEGGEKRALLARYALEDARVTLALAEKFLPLYCELSTIVGQSLNDVARMTSGQLVEWLLMRYATPRGELIPNHPAGEEYAARARATYAGGYVREPKRGLVEHIAVFDFRSFGPSIIVSHNIDPSTLIVGNCEENRAPELEYCFSLEREGFIPAILKELIRRRAEIKRELKRSEGDRRRTLSFAEKALKILANSFYGYMGYPRARWYRRECAESVAAFARMYIKQVMRIAEEEFKLEVVYGDTDSLFVVIPPEKRELAQKFLQKVNESMPGIIELEFEGFYRRGLFVTKKRYALLSEDGKMVVKGLEFVRRDWAPIARETQKEVLRILLEEADPEAAARLVRDVIERIRQRRVSLEDITIYTQLTKRIKSYKSLEPHVVAAQKLKERGREVAPGMIIGYIITKGTKGISQRATPVEFARLEDYDPEYYIDNQILPAIQRIFEAIGYTRDYLKEGITQTSLSRWF

SEQ ID NO: 2564 - protein, 789 aa, unidentified
  REGION 1..789: note = Description of Unknown: Synthetic polypeptide
MPRILKGFLIDADFETVEGRALIRLFLRGEEGSFVVYDDSFSPYFYALPGDEPERVKERILASGAAEAIQKVEIEEKRLFGTPRVALRITVSHPQDVPRIRERIRRVEGVDLILEHDILFVRRRLIDRGIKPLTWLRLEVEERDGRALLRGVEQLEEEPPELRVAAVAIAVYNPKGAPRSSKDEIIMISVATSDGVEKVLTWREVQGLEQVEVLQDEKEMLLRFAELIKEGDYDVIVGYNTDSFDFPYIRDRLKKLGISLPLGRLDAELEVSRRGALPEARIRGRAHVDLYPIVRRHVKLNSYDLESVVEELLGIKKEKLDGERLFTYWDEGGEKRALLARYALEDARVTLALAEKFLPLYCELSTIVGQSLNDVARMTSGQLVEWLLMRYATPRGELIPNHPAGEEYAARARATYAGGYVREPKRGLVEHIAVFDFRSFGPSIIVSHNIDPSTLIVGNCEENRAPELEYCFSLEREGFIPAILKELIRRRAEIKRELKRSEGDRRRTLSFAEKALKILANSFYGYMGYPRARWYRRECAESVAAFARMYIKQVMRIAEEEFKLEVVYGDTDSLFVVIPPEKRELAQKFLQKVNESMPGIIELEFEGFYRRGLFVTKKRYALLSEDGKMVVKGLEFVRRDWAPIARETQKEVLRILLEEADPEKAARLVRDVIERIRQRRVSLEDITIYTQLTKRIKSYKSLEPHVVAAQKLKERGREVAPGMIIGYIITKGTKGISQRATPVEFARLEDYDPEYYIDNQILPAIQRIFEAIGYTRDYLKEGITQTSLS

SEQ ID NO: 2565 - protein, 792 aa, unidentified; identical to SEQ ID NO: 1725
  REGION 1..792: note = Description of Unknown: Synthetic polypeptide

SEQ ID NO: 2566 - protein, 792 aa, unidentified
  REGION 1..792: note = Description of Unknown: Synthetic polypeptide
MPRILKGFLIDADFETVEGRALIRLFLRGEEGSFVVYDDSFSPYFYALPGDEPERVKERILASGAAEAIQKVEIEEKRLFGTPRVALRITVSHPQDVPRIRERIRRVEGVDLILEHDILFVRRYLIDRGIKPLTWLRLEVEERDGRALLRGVEQLEEEPPELRVAAVAIAVYNPKGAPRSSKDEIIMISVATSDGVEKVLTWREVQGLEQVEVLQDEKEMLLRFAELIKEGDYDVIVGYNTDSFDFPYIRDRLKKLGISLPLGRLDAELEVSRRGALPEARIRGRAHVDLYPIVRRHVKLNSYDLESVVEELLGIKKEKLDGERLFTYWDEGGEKRALLARYALEDARVTLALAEKFLPLYCELSTIVGQSLNDVARMTSGQLVEWLLMRYATPRGELIPNHPAGEEYAARARATYAGGYVREPKRGLVEHIAVFDFRSFGPSIIVSHNIDPSTLIVGNCEENRAPELEYCFSLEREGFIPAILKELIRRRAEIKRELKRSEGDRRRTLSFAEKALKILANSFYGYMGYPRARWYRRECAESVAAFARMYIKQVMRIAEEEFKLEVVYGDTDSLFVVIPPEKRELAQKFLQKVNESMPGIIELEFEGFYRRGLFVTKKRYALLSEDGKMVVKGLEFVRRDWAPIARETQKEVLRILLEEADPETAARLVRDVIERIRQRRVSLEDITIYTQLTKRIKSYKSLEPHVVAAQKLKERGREVAPGMIIGYIITKGTKGISQRATPVEFARLEDYDPEYYIDNQILPAIQRIFEAIGYTRDYLKEGITQTSLSRWF

SEQ ID NO: 2567 - protein, 769 aa, unidentified
  REGION 1..769: note = Description of Unknown: Synthetic polypeptide
MPRILKGFLIDADFETVEGRALIRLFLRGEEGSFVVYDDSFSPYFYALPGDEPERVKERILASGAAEAIQKVEIEEKRLFGTPRVALRITVSHPQDVPRIRERIRRVEGVDLILEHDILFVRRYLIDRGIKPLTWLRELRVAAVAIAVYNPKGAPRSSKDEIIMISVATSDGVEKVLTWREVQGLEQVEVLQDEKEMLLRFAELIKEGDYDVIVGYNTDSFDFPYIRDRLKKLGISLPLGRLDAELEVSRRGALPEARIRGRAHVDLYPIVRRHVKLNSYDLESVVEELLGIKKEKLDGERLFTYWDEGGEKRALLARYALEDARVTLALAEKFLPLYCELSTIVGQSLNDVARMTSGQLVEWLLMRYATPRGELIPNHPAGEEYAARARATYAGGYVREPKRGLVEHIAVFDFRSFGPSIIVSHNIDPSTLIVGNCEENRAPELEYCFSLEREGFIPAILKELIRRRAEIKRELKRSEGDRRRTLSFAEKALKILANSFYGYMGYPRARWYRRECAESVAAFARMYIKQVMRIAEEEFKLEVVYGDTDSLFVVIPPEKRELAQKFLQKVNESMPGIIELEFEGFYRRGLFVTKKRYALLSEDGKMVVKGLEFVRRDWAPIARETQKEVLRILLEEADPEKAARLVRDVIERIRQRRVSLEDITIYTQLTKRIKSYKSLEPHVVAAQKLKERGREVAPGMIIGYIITKGTKGISQRATPVEFARLEDYDPEYYIDNQILPAIQRIFEAIGYTRDYLKEGITQTSLSRWF

SEQ ID NO: 2568 - protein, 785 aa, unidentified
  REGION 1..785: note = Description of Unknown: Synthetic polypeptide
MPRILKGFLIDADFETVEGRALIRLFLRGEEGSFVVYDDSFSPYFYALPGDEPERVKERILASGAAEAIQKVEIEEKRLFGTPRVALRITVSHPQDVPRIRERIRRVEGVDLILEHDILFVRRYLIDRGRLEVEERDGRALLRGVEQLEEEPPELRVAAVAIAVYNPKGAPRSSKDEIIMISVATSDGVEKVLTWREVQGLEQVEVLQDEKEMLLRFAELIKEGDYDVIVGYNTDSFDFPYIRDRLKKLGISLPLGRLDAELEVSRRGALPEARIRGRAHVDLYPIVRRHVKLNSYDLESVVEELLGIKKEKLDGERLFTYWDEGGEKRALLARYALEDARVTLALAEKFLPLYCELSTIVGQSLNDVARMTSGQLVEWLLMRYATPRGELIPNHPAGEEYAARARATYAGGYVREPKRGLVEHIAVFDFRSFGPSIIVSHNIDPSTLIVGNCEENRAPELEYCFSLEREGFIPAILKELIRRRAEIKRELKRSEGDRRRTLSFAEKALKILANSFYGYMGYPRARWYRRECAESVAAFARMYIKQVMRIAEEEFKLEVVYGDTDSLFVVIPPEKRELAQKFLQKVNESMPGIIELEFEGFYRRGLFVTKKRYALLSEDGKMVVKGLEFVRRDWAPIARETQKEVLRILLEEADPEKAARLVRDVIERIRQRRVSLEDITIYTQLTKRIKSYKSLEPHVVAAQKLKERGREVAPGMIIGYIITKGTKGISQRATPVEFARLEDYDPEYYIDNQILPAIQRIFEAIGYTRDYLKEGITQTSLSRWF

SEQ ID NO: 2569 - protein, 792 aa, unidentified
  REGION 1..792: note = Description of Unknown: Synthetic polypeptide
MPRILKGFLIDADFETVEGRALIRLFLRGEEGSFVVYDDSFSPYFYALPGDEPERVKERILASGAAEAIQKVEIEEKRLFGTPRVALRITVSHPQDVPRIRERIRRVEGVDLILEHDILFVRRRLIDRGIKPLTWLRLEVEERDGRALLRGVEQLEEEPPELRVAAVAIAVYNPKGAPRSSKDEIIMISVATSDGVEKVLTWREVQGLEQVEVLQDEKEMLLRFAELIKEGDYDVIVGYNTDSFDFPYIRDRLKKLGISLPLGRLDAELEVSRRGALPEARIRGRAHVDLYPIVRRFVKLNSYVLESVVEELLGIKKEKLDGERLFTYWDEGGEKRALLARYALEDARVTLALAEKFLPLYCELSTIVGQSLNDVARMTSGQLVEWLLMRYATPRGELIPNHPAGEEYAARARATYAGGYVREPKRGLVEHIAVFDFRSFGPSIIVSHNIDPSTLIVGNCEENRAPELEYCFSLEREGFIPAILKELIRRRAEIKRELKRSEGDRRRTLSFAEKALKILANSFYGYMGYPRARWYRRECAESVAAFARMYIKQVMRIAEEEFKLEVVYGDTDSLFVVIPPEKRELAQKFLQKVNESMPGIIELEFEGFYRRGLFVTKKRYALLSEDGKMVVKGLEFVRRDWAPIARETQKEVLRILLEEADPEKAARLVRDVIERIRQRRVSLEDITIYTQLTKRIKSYKSLEPHVVAAQKLKERGREVAPGMIIGYIITKGTKGISQRATPVEFARLEDYDPEYYIDNQILPAIQRIFEAIGYTRDYLKEGITQTSLSRWF

SEQ ID NO: 2570 - protein, 792 aa, unidentified
  REGION 1..792: note = Description of Unknown: Synthetic polypeptide
MPRILKGFLIDADFETVEGRALIRLFLRGEEGSFVVYDDSFSPYFYALPGDEPERVKERILASGAAEAIQKVEIEEKRLFGTPRVALRITVSHPQDVPRIRERIRRVEGVDLILEHDILFVRRRLIDRGIKPLTWLRLEVEERDGRALLRGVEQLEEEPPELRVAAVAIAVYNPKGAPRSSKDEIIMISVATSDGVEKVLTWREVQGLEQVEVLQDEKEMLLRFAELIKEGDYDVIVGYNTDSFDFPYIRDRLKKLGISLPLGRLDAELEVSRRGALPEARIRGRAHVDLYPIVRRHVKLNSYDLESVVEELLGIKKEKLDGERLFTYWDEGGEKRALLARYALEDARVTLALGEKFLPLYCELSTIVGQSLNDVARMTSGQLVEWLLMRYATPRGELIPNHPAGEEYAARARATYAGGYVREPKRGLVEHIAVFDFRSFGPSIIVSHNIDPSTLIVGNCEENRAPELEYCFSLEREGFIPAILKELIRRRAEIKRELKRSEGDRRRTLSFAEKALKILANSFYGYMGYPRARWYRRECAESVAAFARMYIKQVMRIAEEEFKLEVVYGDTDSLFVVIPPEKRELAQKFLQKVNESMPGIIELEFEGFYRRGLFVTKKRYALLSEDGKMVVKGLEFVRRDWAPIARETQKEVLRILLEEADPEKAARLVRDVIERIRQRRVSLEDITIYTQLTKRIKSYKSLEPHVVAAQKLKERGREVAPGMIIGYIITKGTKGISQRATPVEFARLEDYDPEYYIDNQILPAIQRIFEAIGYTRDYLKEGITQTSLSRWF

SEQ ID NO: 2571 - protein, 792 aa, unidentified
  REGION 1..792: note = Description of Unknown: Synthetic polypeptide
MPRILKGFLIDADFETVEGRALIRLFLRGEEGSFVVYDDSFSPYFYALPGDEPERVKERILASGAAEAIQKVEIEEKRLFGTPRVALRITVSHPQDVPRIRERIRRVEGVDLILEHDILFVRRRLIDRGIKPLTWLRLEVEERDGRALLRGVEQLEEEPPELRVAAVAIAVYNPKGAPRSSKDEIIMISVATSDGVEKVLTWREVQGLEQVEVLQDEKEMLLRFAELIKEGDYDVIVGYNTDSFDFPYIRDRLKKLGISLPLGRLDAELEVSRRGALPEARIRGRAHVDLYPIVRRHVKLNSYDLESVVEELMGIKKEKLDGERLFTYWDEGGEKRALLARYALEDARVTLALAEKFLPLYCELSTIVGQSLNDVARMTSGQLVEWLLMRYATPRGELIPNHPAGEEYAARARATYAGGYVREPKRGLVEHIAVFDFRSFGPSIIVSHNIDPSTLIVGNCEENRAPELEYCFSLEREGFIPAILKELIRRRAEIKRELKRSEGDRRRTLSFAEKALKILANSFYGYMGYPRARWYRRECAESVAAFARMYIKQVMRIAEEEFKLEVVYGDTDSLFVVIPPEKRELAQKFLQKVNESMPGIIELEFEGFYRRGLFVTKKRYALLSEDGKMVVKGLEFVRRDWAPIARETQKEVLRILLEEADPEKAARLVRDVIERIRQRRVSLEDITIYTQLTKRIKSYKSLEPHVVAAQKLKERGREVAPGMIIGYIITKGTKGISQRATPVEFARLEDYDPEYYIDNQILPAIQRIFEAIGYTRDYLKEGITQTSLSRWF

SEQ ID NO: 2572 - protein, 782 aa, unidentified
  REGION 1..782: note = Description of Unknown: Synthetic polypeptide
MPRILKGFLIDADFETVEGRALIRLFLRGEEGSFVVYDDSFSPYFYALPGDEPERVKERILASGAAEAIQKVEIEEKRLFGTPRVALRITVSHPQDVPRIRERIRRVEGVDLILEHDILFVRRYLIDRGIKPLTWLRLEVEEEQLEEEPPELRVAAVAIAVYNPKGAPRSSKDEIIMISVATSDGVEKVLTWREVQGLEQVEVLQDEKEMLLRFAELIKEGDYDVIVGYNTDSFDFPYIRDRLKKLGISLPLGRLDAELEVSRRGALPEARIRGRAHVDLYPIVRRHVKLNSYDLESVVEELLGIKKEKLDGERLFTYWDEGGEKRALLARYALEDARVTLALAEKFLPLYCELSTIVGQSLNDVARMTSGQLVEWLLMRYATPRGELIPNHPAGEEYAARARATYAGGYVREPKRGLVEHIAVFDFRSFGPSIIVSHNIDPSTLIVGNCEENRAPELEYCFSLEREGFIPAILKELIRRRAEIKRELKRSEGDRRRTLSFAEKALKILANSFYGYMGYPRARWYRRECAESVAAFARMYIKQVMRIAEEEFKLEVVYGDTDSLFVVIPPEKRELAQKFLQKVNESMPGIIELEFEGFYRRGLFVTKKRYALLSEDGKMVVKGLEFVRRDWAPIARETQKEVLRILLEEADPEKAARLVRDVIERIRQRRVSLEDITIYTQLTKRIKSYKSLEPHVVAAQKLKERGREVAPGMIIGYIITKGTKGISQRATPVEFARLEDYDPEYYIDNQILPAIQRIFEAIGYTRDYLKEGITQTSLSRWF

SEQ ID NO: 2573 - protein, 792 aa, unidentified
  REGION 1..792: note = Description of Unknown: Synthetic polypeptide
MPRILKGFLIDADFETVEGRALIRLFLRGEEGSFVVYDDSFSPYFYALPGDEPERVKERILASGAAEAIQKVEIEEKRLFGTPRVALRITVSHPQDVPRIRERIRRVEGVDLILEHDILFVRRRLIDRGIKPLTWLRLEVEERDGRALLRGVEQLEEEPPELRVAAVAIAVYNPKGAPRSSKDEIIMISVATSDGVEKVLTWREVQGLEQVEVLQDEKEMLLRFAELIKEGDYDVIVGYNTDSFDFPYIRDRLKKLGISLPLGRLDAELEVSRRGALPEARIRGRAHVDLYPIVRRHVKLNSYDLESVVEELLGIKKEKLDGERLFTYWDEGGEKRALLARYALEDARVTLALAEKFLPVYCELSTIVGQSLNDVARMTSGQLVEWLLMRYATPRGELIPNHPAGEEYAARARATYAGGYVREPKRGLVEHIAVFDFRSFGPSIIVSHNIDPSTLIVGNCEENRAPELEYCFSLEREGFIPAILKELIRRRAEIKRELKRSEGDRRRTLSFAEKALKILANSFYGYMGYPRARWYRRECAESVAAFARMYIKQVMRIAEEEFKLEVVYGDTDSLFVVIPPEKRELAQKFLQKVNESMPGIIELEFEGFYRRGLFVTKKRYALLSEDGKMVVKGLEFVRRDWAPIARETQKEVLRILLEEADPEKAARLVRDVIERIRQRRVSLEDITIYTQLTKRIKSYKSLEPHVVAAQKLKERGREVAPGMIIGYIITKGTKGISQRATPVEFARLEDYDPEYYIDNQILPAIQRIFEAIGYTRDYLKEGITQTSLSRWF

SEQ ID NO: 2574 - protein, 792 aa, unidentified
  REGION 1..792: note = Description of Unknown: Synthetic polypeptide
MPRILKGFLIDADFETVEGRALIRLFLRGEEGSFVVYDDSFSPYFYALPGDEPERVKERILASGAAEAIQKVEIEEKRLFGTPRVALRITVSHPQDVPRIRERIRRVEGVDLILEHDILFVRRRLIDRGIKPLTWLRLEVEERDGRALLRGVEQLEEEPPELRVAAVAIAVYNPKGAPRSSKDEIIMISVATSDGVEKVITWREVQGLEQVEVLQDEKEMLLRFAELIKEGDYDVIVGYNTDSFDFPYIRDRLKKLGISLPLGRLDAELEVSRRGALPEARIRGRAHVDLYPIVRRHVKLNSYDLESVVEELLGIKKEKLDGERLFTYWDEGGEKRALLARYALEDARVTLALAEKFLPLYCELSTIVGQSLNDVARMTSGQLVEWLLMRYATPRGELIPNHPAGEEYAARARATYAGGYVREPKRGLVEHIAVFDFRSFGPSIIVSHNIDPSTLIVGNCEENRAPELEYCFSLEREGFIPAILKELIRRRAEIKRELKRSEGDRRRTLSFAEKALKILANSFYGYMGYPRARWYRRECAESVAAFARMYIKQVMRIAEEEFKLEVVYGDTDSLFVVIPPEKRELAQKFLQKVNESMPGIIELEFEGFYRRGLFVTKKRYALLSEDGKMVVKGLEFVRRDWAPIARETQKEVLRILLEEADPEKAARLVRDVIERIRQRRVSLEDITIYTQLTKRIKSYKSLEPHVVAAQKLKERGREVAPGMIIGYIITKGTKGISQRATPVEFARLEDYDPEYYIDNQILPAIQRIFEAIGYTRDYLKEGITQTSLSRWF

SEQ ID NO: 2575 - protein, 792 aa, unidentified
  REGION 1..792: note = Description of Unknown: Synthetic polypeptide
MPRILKGFLIDADFETVEGRALIRLFLRGEEGSFVVYDDSFSPYFYALPGDEPERVKERILASGAAEAIQKVEIEEKRLFGTPRVALRITVSHPQDVPRIRERIRRVEGVDLILEHDILFVRRRLIDRGIKPLTWLRLEVEERDGRALLRGVEQLEEEPPELRVAAVAIAVYNPKGAPRSSKDEIIMISVATSDGVEKVLTWREVQGLEQVEVLQDEKEMLLRFAELIKEGDYDVIVGYNTDSFDFPYIRDRLKKLGISLPLGRLDAELEVSRRGALPEARIRGRAHVDLYPIVRRHVKLNSYDLESVVEELLGIKKEKLDGERLFTYWDEGGEKRALLARYALEDARVTLALAEKFLPLYCELSTIVGQSLNDVARMTSGQLVEWLLMRYATPRGELIPNHPAGEEYAARARATYAGGYVREPKRGLVEHIAVFDFRSFGPSIIVSHNIDPSTLIVGNCEENRAPELEYCFSLEREGFIPAILKELIRRRAEIKRELKRSEGDRRRTLSFAEKALKILANSFYGYMGYPRARWYRRECAESVAAFARMYIKQVMRIAKEEFKLEVVYGDTDSLFVVIPPEKRELAQKFLQKVNESMPGIIELEFEGFYRRGLFVTKKRYALLSEDGKMVVKGLEFVRRDWAPIARETQKEVLRILLEEADPEKAARLVRDVIERIRQRRVSLEDITIYTQLTKRIKSYKSLEPHVVAAQKLKERGREVAPGMIIGYIITKGTKGISQRATPVEFARLEDYDPEYYIDNQILPAIQRIFEAIGYTRDYLKEGITQTSLSRWF

SEQ ID NO: 2576 - protein, 792 aa, unidentified
  REGION 1..792: note = Description of Unknown: Synthetic polypeptide
MPRILKGFLIDADFETVEGRALIRLFLRGEEGSFVVYDDSFSPYFYALPGDEPERVKERILASGAAEAIQKVEIEEKRLFGTPRVALRITVSHPQDVPRIRERIRRVEGVDLILEHDILFVRRRLIDRGIKPLTWLRLEVEERDGRALLRGVEQLEEEPPELRVAAVAIAVYNPKGAPRSSKDEIIMISVATSDGVEKVLTWREVQGLEQVEVLQDEKEMLLRFAELIKEGDYDVIVGYNTDSFDFPYIRDRLKKLGISLPLGRLDAELEVSRRGALPEARIRGRAHVDLYPIVRRHVKLNSYDLESVVEELLGIKKEKLDGERLFTYWDEGGEKRALLARYALEDARVTLALAEKFLPLYCELSTIVGQSLNDVARMTSGQLVEWLLMRYATPRGELIPNHPAGEEYAARARATYAGGYVREPKRGLVEHIAVFDFRSFGPSIIVSHNIDPSTLIVGNCEENRAPELEYCFSLEREGFIPAILKELIRRRAEIKRELKRSEGDRRRTLSFAEKALKILANSFYGYMGYPRARWYRRECAESVAAFARMYIKQVMRIAEEEFKLEVVYGDTDSLFVVIPPEKRELAQKFLQKVNESMPGIIELEFEGFYRRGLFVTKKRYALLSEDGKMVVKGLEFVRRDWAPIARETQKEVLRILLEEADPEKAARLVRDVTERIRQRRVSLEDITIYTQLTKRIKSYKSLEPHVVAAQKLKERGREVAPGMIIGYIITKGTKGISQRATPVEFARLEDYDPEYYIDNQILPAIQRIFEAIGYTRDYLKEGITQTSLSRWF

SEQ ID NO: 2577 - protein, 792 aa, unidentified
  REGION 1..792: note = Description of Unknown: Synthetic polypeptide
MPRILKGFLIDADFETVEGRALIRLFLRGEEGSFVVYDDSFSPYFYALPGDEPERVKERILASGAAEAIQKVEIEEKRLFGTPRVALRITVSHPQDVPRIRERIRRVEGVDLILEHDILFVRRRLIDRGIKPLTWLRLEVEERDGRALLRGVEQLEEEPPELRVAAVAIAVYNPKGAPRSSKDEIIMISVATSDGVEKVLTWREVQGLEQVEVLQDEKEMLLRFAELIKEGDYDVIVGYNTDSFDFPYIRDRLKKLGISLPLGRLDAELEVSRRGALPEARIRGRAHVDLYPIVRRHVKLNSYDLESVVEELLGIKKEKLDGERLFTYWDEGGEKRALLARYALEDARVTLALAEKFLPLYCELSTIVGQSLNDVARMTSGQLVEWLLMRYATPRGELIPNHPAGEEYAARARATYAGGYVREPKRGLVEHIAVFDFRSFGPSIIVSHNIDPSTLIVGNCEENRAPELEYCFSLEREGFIPAILKELIRRRAEIKRELKRSEGDRRRTLSFAEKALKILANSFYGYMGYPRARWYRRECAESVAAFARMYIKQVMRIANEEFKLEVVYGDTDSLFVVIPPEKRELAQKFLQKVNESMPGIIELEFEGFYRRGLFVTKKRYALLSEDGKMVVKGLEFVRRDWAPIARETQKEVLRILLEEADPEKAARLVRDVIERIRQRRVSLEDITIYTQLTKRIKSYKSLEPHVVAAQKLKERGREVAPGMIIGYIITKGTKGISQRATPVEFARLEDYDPEYYIDNQILPAIQRIFEAIGYTRDYLKEGITQTSLSRWF

SEQ ID NO: 2578 - protein, 792 aa, unidentified
  REGION 1..792: note = Description of Unknown: Synthetic polypeptide
MPRILKGFLIDADFETVEGRALIRLFLRGEEGSFVVYDDSFSPYFYALPGDEPERVKERILASGAAEAIQKVEIEEKRLFGTPRVALRITVSHPQDVPRIRERIRRVEGVDLILEHDILFVRRRLIDRGIKPLTWLRLEVEERDGRALLRGVEQLEEEPPELRVAAVAIAVYNPKGAPRSSKDEILMISVATSDGVEKVLTWREVQGLEQVEVLQDEKEMLLRFAELIKEGDYDVIVGYNTDSFDFPYIRDRLKKLGISLPLGRLDAELEVSRRGALPEARIRGRAHVDLYPIVRRHVKLNSYDLESVVEELLGIKKEKLDGERLFTYWDEGGEKRALLARYALEDARVTLALAEKFLPLYCELSTIVGQSLNDVARMTSGQLVEWLLMRYATPRGELIPNHPAGEEYAARARATYAGGYVREPKRGLVEHIAVFDFRSFGPSIIVSHNIDPSTLIVGNCEENRAPELEYCFSLEREGFIPAILKELIRRRAEIKRELKRSEGDRRRTLSFAEKALKILANSFYGYMGYPRARWYRRECAESVAAFARMYIKQVMRIAEEEFKLEVVYGDTDSLFVVIPPEKRELAQKFLQKVNESMPGIIELEFEGFYRRGLFVTKKRYALLSEDGKMVVKGLEFVRRDWAPIARETQKEVLRILLEEADPEKAARLVRDVIERIRQRRVSLEDITIYTQLTKRIKSYKSLEPHVVAAQKLKERGREVAPGMIIGYIITKGTKGISQRATPVEFARLEDYDPEYYIDNQILPAIQRIFEAIGYTRDYLKEGITQTSLSRWF

SEQ ID NO: 2579 - protein, 792 aa, unidentified
  REGION 1..792: note = Description of Unknown: Synthetic polypeptide
MPRILKGFLIDADFETVEGRALIRLFLRGEEGSFVVYDDSFSPYFYALPGDEPERVKERILASGAAEAIQKVEIEEKRLFGTPRVALRITVSHPQDVPRIRERIRRVEGVDLILEHDILFVRRYLIDRGIKPLTWLRLEVEERDGRALLRGVEQLEEEPPELRVAAVAIAVYNPKGAPRSSKDEIIMISVATSDGVEKVLTWREVQGLEQVEVLQDEKEMLLRFAELIKEGDYDVIVGYNTDSFDFPYIRDRLKKLGISLPLGRLDAELEVSRRGALPEARIRGRAHVDLYPIVRRHVKLNSYDLESVVEELLGIKKEKLDGERLFTYWDEGGEKRALLARYALEDARVTLALAEKFLPLYCELSTIVGQSLNDVARMTSGQLVEWLLMRYATPRGELIPNHPAGEEYAARARATYAGGYVREPKRGLVEHIAVFDFRSFGPSIIVSHNIDPSTLIVGNCEENRAPELEYCFSLEREGFIPAILKELIRRRAEIKRELKRSEGDRRRTLSFAEKALKILANSFYGYMGYPRARWYRRECATSVAAFARMYIKQVMRIAEEEFKLEVVYGDTDSLFVVIPPEKRELAQKFLQKVNESMPGIIELEFEGFYRRGLFVTKKRYALLSEDGKMVVKGLEFVRRDWAPIARETQKEVLRILLEEADPEKAARLVRDVIERIRQRRVSLEDITIYTQLTKRIKSYKSLEPHVVAAQKLKERGREVAPGMIIGYIITKGTKGISQRATPVEFARLEDYDPEYYIDNQILPAIQRIFEAIGYTRDYLKEGITQTSLSRWF

SEQ ID NO: 2580 - protein, 792 aa, unidentified
  REGION 1..792: note = Description of Unknown: Synthetic polypeptide
MPRILKGFLIDADFETVEGRALIRLFLRGEEGSFVVYDDSFSPYFYALPGDEPERVKERILASGAAEAIQKVEIEEKRLFGTPRVALRITVSHPQDVPRIRERIRRVEGVDLILEHDILFVRRRLIDRGIKPLTWLRLEVEERDGRALLRGVEQLEEEPPELRVAAVAIAVYNPKGAPRSSKDEIIMISVATSDGVEKVLTWREVQGLEQVEVLQDEKEMLLRFAELIKEGDYDVIVGYNTDSFDFPYIRDRLKKLGISLPLGRLDAELEVSRRGALPEARIRGRAHVDLYPIVRRHVKLNSYVLESVVEELMGIKKEKLDGERLFTYWDEGGEKRALLARYALEDARVTLALAEKFLPLYCELSTIVGQSLNDVARMTSGQLVEWLLMRYATPRGELIPNHPAGEEYAARARATYAGGYVREPKRGLVEHIAVFDFRSFGPSIIVSHNIDPSTLIVGNCEENRAPELEYCFSLEREGFIPAILKELIRRRAEIKRELKRSEGDRRRTLSFAEKALKILANSFYGYMGYPRARWYRRECAESVAAFARMYIKQVMRIAEEEFKLEVVYGDTDSLFVVIPPEKRELAQKFLQKVNESMPGIIELEFEGFYRRGLFVTKKRYALLSEDGKMVVKGLEFVRRDWAPIARETQKEVLRILLEEADPEKAARLVRDVIERIRQRRVSLEDITIYTQLTKRIKSYKSLEPHVVAAQKLKERGREVAPGMIIGYIITKGTKGISQRATPVEFARLEDYDPEYYIDNQILPAIQRIFEAIGYTRDYLKEGITQTSLSRWF

SEQ ID NO: 2581 - protein, 792 aa, unidentified
  REGION 1..792: note = Description of Unknown: Synthetic polypeptide
MPRILKGFLIDADFETVEGRALIRLFLRGEEGSFVVYDDSFSPYFYALPGDEPERVKERILASGAAEAIQKVEIEEKRLFGTPRVALRITVSHPQDVPRIRERIRRVEGVDLILEHDILFVRRRLIDRGIKPLTWLRLEVEERDGRALLRGVEQLEEEPPELRVAAVAIAVYNPKGAPRSSKDEIIMISVATSDGVEKVLTWREVQGLEQVEVLQDEKEMLLRFAELIKEGDYDVIVGYNTDSFDFPYIRDRLKKLGISLPLGRLDAELEVSRRGALPEARIRGRAHVDLYPIVRRHVKLNSYDLESVVEELLGIKKEKVDGERLFTYWDEGGEKRALLARYALEDARVTLALAEKFLPLYCELSTIVGQSLNDVARMTSGQLVEWLLMRYATPRGELIPNHPAGEEYAARARATYAGGYVREPKRGLVEHIAVFDFRSFGPSIIVSHNIDPSTLIVGNCEENRAPELEYCFSLEREGFIPAILKELIRRRAEIKRELKRSEGDRRRTLSFAEKALKILANSFYGYMGYPRARWYRRECAESVAAFARMYIKQVMRIAEEEFKLEVVYGDTDSLFVVIPPEKRELAQKFLQKVNESMPGIIELEFEGFYRRGLFVTKKRYALLSEDGKMVVKGLEFVRRDWAPIARETQKEVLRILLEEADPEKAARLVRDVIERIRQRRVSLEDITIYTQLTKRIKSYKSLEPHVVAAQKLKERGREVAPGMIIGYIITKGTKGISQRATPVEFARLEDYDPEYYIDNQILPAIQRIFEAIGYTRDYLKEGITQTSLSRWF

SEQ ID NO: 2582 - protein, 792 aa, unidentified
  REGION 1..792: note = Description of Unknown: Synthetic polypeptide
MPRILKGFLIDADFETVEGRALIRLFLRGEEGSFVVYDDSFSPYFYALPGDEPERVKERILASGAAEAIQKVEIEEKRLFGTPRVALRITVSHPQDVPRIRERIRRVEGVDLILEHDILFVRRYLIDRGIKPLTWLRLEVEERDGRALLRGVEQLEEEPPELRVAAVAIAVYNPKGAPRSSKDEIIMISVATSDGVEKVLTWREVQGLEQVEVLQDEKEMLLRFAELIKEGDYDVIVGYNTDSFDFPYIRDRLKKLGISLPLGRLDAELEVSRRGALPEARIRGRAHVDLYPIVRRHVKLNSYNLESVVEELLGIKKEKLDGERLFTYWDEGGEKRALLARYALEDARVTLALAEKFLPLYCELSTIVGQSLNDVARMTSGQLVEWLLMRYATPRGELIPNHPAGEEYAARARATYAGGYVREPKRGLVEHIAVFDFRSFGPSIIVSHNIDPSTLIVGNCEENRAPELEYCFSLEREGFIPAILKELIRRRAEIKRELKRSEGDRRRTLSFAEKALKILANSFYGYMGYPRARWYRRECAESVAAFARMYIKQVMRIAEEEFKLEVVYGDTDSLFVVIPPEKRELAQKFLQKVNESMPGIIELEFEGFYRRGLFVTKKRYALLSEDGKMVVKGLEFVRRDWAPIARETQKEVLRILLEEADPEKAARLVRDVIERIRQRRVSLEDITIYTQLTKRIKSYKSLEPHVVAAQKLKERGREVAPGMIIGYIITKGTKGISQRATPVEFARLEDYDPEYYIDNQILPAIQRIFEAIGYTRDYLKEGITQTSLSRWF

SEQ ID NO: 2583 - protein, 792 aa, unidentified
  REGION 1..792: note = Description of Unknown: Synthetic polypeptide
MPRILKGFLIDADFETVEGRALIRLFLRGEEGSFVVYDDSFSPYFYALPGDEPERVKERILASGAAEAIQKVEIEEKRLFGTPRVALRITVSHPQDVPRIRERIRRVEGVDLILEHDILFVRRYLIDRGIKPLTWLRLEVEERDGRALLRGVEQLEEEPPELRVAAVAIAVYNPKGAPRSSKDEIIMISVATSDGVEKVLTWREVQGLEQVEVLQDEKEMLLRFAELIKEGDYDVIVGYNTDSFDFPYIRDRLKKLGISLPLGRLDAELEVSRRGALPEARIRGRAHVDLYPIVRRHVKLNSYDLESVVEELLGIKKEKLDGERLFTYWDEGGEKRALLARYALEDARVTLALAEKFLPLYCELSTIVGQSLNDVARMTSGQLVEWLLMRYATPRGELIPNHPAGEEYAARARATYAGGYVREPKRGLVEHIAVFDFRSFGPSIIVSHNIDPSTLIVGNCEENRAPELEYCFSLEREGFIPAILKELIRRRAEIKRELKRSEGDRRRTLSFAEKALKILANSFYGYMGYPRARWYRRECAESVAAFARMYIKQVMRIAEEEFKLEVVYGDTDSLFVVIPPEKRELAQKFLQKVNESMPGIIELEFEGFYRRGLFVTKKRYALLSEDGKMVVKGLEFVRRDWAPIARETQKEVLRILLEEADPEVAARLVRDVIERIRQRRVSLEDITIYTQLTKRIKSYKSLEPHVVAAQKLKERGREVAPGMIIGYIITKGTKGISQRATPVEFARLEDYDPEYYIDNQILPAIQRIFEAIGYTRDYLKEGITQTSLSRWF

SEQ ID NO: 2584 - protein, 792 aa, unidentified
  REGION 1..792: note = Description of Unknown: Synthetic polypeptide
MPRILKGFLIDADFETVEGRALIRLFLRGEEGSFVVYDDSFSPYFYALPGDEPERVKERILASGAAEAIQKVEIEEKRLFGTPRVALRITVSHPQDVPRIRERIRRVEGVDLILEHDILFVRRRLIDRGIKPLTWLRLEVEERDGRALLRGVEQLEEEPPELRVAAVAIAVYNPKGAPRSSKDEIIMISYATSDGVEKVLTWREVQGLEQVEVLQDEKEMLLRFAELIKEGDYDVIVGYNTDSFDFPYIRDRLKKLGISLPLGRLDAELEVSRRGALPEARIRGRAHVDLYPIVRRHVKLNSYDLESVVEELLGIKKEKLDGERLFTYWDEGGEKRALLARYALEDARVTLALAEKFLPLYCELSTIVGQSLNDVARMTSGQLVEWLLMRYATPRGELIPNHPAGEEYAARARATYAGGYVREPKRGLVEHIAVFDFRSFGPSIIVSHNIDPSTLIVGNCEENRAPELEYCFSLEREGFIPAILKELIRRRAEIKRELKRSEGDRRRTLSFAEKALKILANSFYGYMGYPRARWYRRECAESVAAFARMYIKQVMRIAEEEFKLEVVYGDTDSLFVVIPPEKRELAQKFLQKVNESMPGIIELEFEGFYRRGLFVTKKRYALLSEDGKMVVKGLEFVRRDWAPIARETQKEVLRILLEEADPEKAARLVRDVIERIRQRRVSLEDITIYTQLTKRIKSYKSLEPHVVAAQKLKERGREVAPGMIIGYIITKGTKGISQRATPVEFARLEDYDPEYYIDNQILPAIQRIFEAIGYTRDYLKEGITQTSLSRWF

SEQ ID NO: 2585 - protein, 792 aa, unidentified
  REGION 1..792: note = Description of Unknown: Synthetic polypeptide
MPRILKGFLIDADFETVEGRALIRLFLRGEEGSFVVYDDSFSPYFYALPGDEPERVKERILASGAAEAIQKVEIEEKRLFGTPRVALRITVSHPQDVPRIRERIRRVEGVDLILEHDILFVRRYLIDRGIKPLTWLRLEVEERDGRALLRGVEQLEEEPPELRVAAVAIAVYNPKGAPRSSKDEIIMISVATSDGVEKVLTWREVQGLEQVEVLQDEKEMLLRFAELIKEGDYDVIVGYNTDSFDFPYIRDRLKKLGISLPLGRLDAELEVSRRGALPEARIRGRAHVDLYPIVRRHVKLNSYRLESVVEELLGIKKEKLDGERLFTYWDEGGEKRALLARYALEDARVTLALAEKFLPLYCELSTIVGQSLNDVARMTSGQLVEWLLMRYATPRGELIPNHPAGEEYAARARATYAGGYVREPKRGLVEHIAVFDFRSFGPSIIVSHNIDPSTLIVGNCEENRAPELEYCFSLEREGFIPAILKELIRRRAEIKRELKRSEGDRRRTLSFAEKALKILANSFYGYMGYPRARWYRRECAESVAAFARMYIKQVMRIAEEEFKLEVVYGDTDSLFVVIPPEKRELAQKFLQKVNESMPGIIELEFEGFYRRGLFVTKKRYALLSEDGKMVVKGLEFVRRDWAPIARETQKEVLRILLEEADPEKAARLVRDVIERIRQRRVSLEDITIYTQLTKRIKSYKSLEPHVVAAQKLKERGREVAPGMIIGYIITKGTKGISQRATPVEFARLEDYDPEYYIDNQILPAIQRIFEAIGYTRDYLKEGITQTSLSRWF

SEQ ID NO: 2586 - protein, 792 aa, unidentified
  REGION 1..792: note = Description of Unknown: Synthetic polypeptide
MPRILKGFLIDADFETVEGRALIRLFLRGEEGSFVVYDDSFSPYFYALPGDEPERVKERILASGAAEAIQKVEIEEKRLFGTPRVALRITVSHPQDVPRIRERIRRVEGVDLILEHDILFVRRRLIDRGIKPLTWLRLEVEERDGRALLRGVEQLEEEPPELRVAAVAIAVYNPKGAPRSSKDEIIMISVATSDGVEKVLTWREVQGLEQVEVLQDEKEMLLRFAELIKEGDYDVIVGYNTDSFDFPYIRDRLKKLGISLPLGRLDAELEVSRRGALPEARIRGRAHVDLYPIVRRHVKLNSYDLESVVEELLGIKKEKLDGERLFQYWDEGGEKRALLARYALEDARVTLALAEKFLPLYCELSTIVGQSLNDVARMTSGQLVEWLLMRYATPRGELIPNHPAGEEYAARARATYAGGYVREPKRGLVEHIAVFDFRSFGPSIIVSHNIDPSTLIVGNCEENRAPELEYCFSLEREGFIPAILKELIRRRAEIKRELKRSEGDRRRTLSFAEKALKILANSFYGYMGYPRARWYRRECAESVAAFARMYIKQVMRIAEEEFKLEVVYGDTDSLFVVIPPEKRELAQKFLQKVNESMPGIIELEFEGFYRRGLFVTKKRYALLSEDGKMVVKGLEFVRRDWAPIARETQKEVLRILLEEADPEKAARLVRDVIERIRQRRVSLEDITIYTQLTKRIKSYKSLEPHVVAAQKLKERGREVAPGMIIGYIITKGTKGISQRATPVEFARLEDYDPEYYIDNQILPAIQRIFEAIGYTRDYLKEGITQTSLSRWF

SEQ ID NO: 2587 - protein, 792 aa, unidentified
  REGION 1..792: note = Description of Unknown: Synthetic polypeptide
MPRILKGFLIDADFETVEGRALIRLFLRGEEGSFVVYDDSFSPYFYALPGDEPERVKERILASGAAEAIQKVEIEEKRLFGTPRVALRITVSHPQDVPRIRERIRRVEGVDLILEHDILFVRRYLIDRGIKPLTWLRLEVEERDGRALLRGVEQLEEEPPELRVAAVAIAVYNPKGAPRSSKDEIIMISVATSDGVEKVLTWREVQGLEQVEVLQDEKEMLLRFAELIKEGDYDVIVGYNTDSFDFPYIRDRLKKLGISLPLGRLDAELEVSRRGALPEARIRGRAHVDLYPIVRRHVKLNSYVLESVVEELLGIKKEKLDGERLFTYWDEGGEKRALLARYALEDARVTLALAEKFLPLYCELSTIVGQSLNDVARMTSGQLVEWLLMRYATPRGELIPNHPAGEEYAARARATYAGGYVREPKRGLVEHIAVFDFRSFGPSIIVSHNIDPSTLIVGNCEENRAPELEYCFSLEREGFIPAILKELIRRRAEIKRELKRSEGDRRRTLSFAEKALKILANSFYGYMGYPRARWYRRECAESVAAFARMYIKQVMRIAEEEFKLEVVYGDTDSLFVVIPPEKRELAQKFLQKVNESMPGIIELEFEGFYRRGLFVTKKRYALLSEDGKMVVKKLEFVRRRWAPIARETQKEVLRILLEEADPEKAARLVRDVIERIRQRRVSLEDITIYTQLTKRIKSYKSLEPHVVAAQKLKERGREVAPGMIIGYIITKGTKRISQRATPVEFARLEDYDPEYYIDNQILPAIQRIFEAIGYTRDYLKEGITQTSLSRWF

SEQ ID NO: 2588 - protein, 792 aa, unidentified
  REGION 1..792: note = Description of Unknown: Synthetic polypeptide
MPRILKGFLIDADFETVEGRALIRLFLRGEEGSFVVYDDSFSPYFYALPGDEPERVKERILASGAAEAIQKVEIEEKRLFGTPRVALRITVSHPQDVPRIRERIRRVEGVDLILEHDILFVRRRLIDRGIKPLTWLRLEVEERDGRALLRGVEQLEEEPPELRVAAVAIAVYNPKGAPRSSKDEIIMISVATSDGVEKVLTWREVQGLEQVEVLQDEKEMLLRFAELIKEGDYDVIVGYNTDSFDFPYIRDRLKKLGISLPLGRLDAELEVSRRGALPEARIRGRAHVDLYPIVRRHVKLNSYDLESVVEELLGIKKEKLDGERLFTYWDEGGEKRALLARYALEDARVTLALAEKFLPLYCELSTLVGQSLNDVARMTSGQLVEWLLMRYATPRGELIPNHPAGEEYAARARATYAGGYVREPKRGLVEHIAVFDFRSFGPSIIVSHNIDPSTLIVGNCEENRAPELEYCFSLEREGFIPAILKELIRRRAEIKRELKRSEGDRRRTLSFAEKALKILANSFYGYMGYPRARWYRRECAESVAAFARMYIKQVMRIAEEEFKLEVVYGDTDSLFVVIPPEKRELAQKFLQKVNESMPGIIELEFEGFYRRGLFVTKKRYALLSEDGKMVVKGLEFVRRDWAPIARETQKEVLRILLEEADPEKAARLVRDVIERIRQRRVSLEDITIYTQLTKRIKSYKSLEPHVVAAQKLKERGREVAPGMIIGYIITKGTKGISQRATPVEFARLEDYDPEYYIDNQILPAIQRIFEAIGYTRDYLKEGITQTSLSRWF

SEQ ID NO: 2589 - protein, 792 aa, unidentified
  REGION 1..792: note = Description of Unknown: Synthetic polypeptide
MPRILKGFLIDADFETVEGRALIRLFLRGEEGSFVVYDDSFSPYFYALPGDEPERVKERILASGAAEAIQKVEIEEKRLFGTPRVALRITVSHPQDVPRIRERIRRVEGVDLILEHDILFVRRRLIDRGIKPLTWLRLEVEERDGRALLRGVEQLEEEPPELRVAAVAIAVYNPKGAPRSSKDEIIMISVATSDGVEKVLTWREVQGLEQVEVLQDEKEMLLRFAELIKEGDYDVIIGYNTDSFDFPYIRDRLKKLGISLPLGRLDAELEVSRRGALPEARIRGRAHVDLYPIVRRHVKLNSYDLESVVEELLGIKKEKLDGERLFTYWDEGGEKRALLARYALEDARVTLALAEKFLPLYCELSTIVGQSLNDVARMTSGQLVEWLLMRYATPRGELIPNHPAGEEYAARARATYAGGYVREPKRGLVEHIAVFDFRSFGPSIIVSHNIDPSTLIVGNCEENRAPELEYCFSLEREGFIPAILKELIRRRAEIKRELKRSEGDRRRTLSFAEKALKILANSFYGYMGYPRARWYRRECAESVAAFARMYIKQVMRIAEEEFKLEVVYGDTDSLFVVIPPEKRELAQKFLQKVNESMPGIIELEFEGFYRRGLFVTKKRYALLSEDGKMVVKGLEFVRRDWAPIARETQKEVLRILLEEADPEKAARLVRDVIERIRQRRVSLEDITIYTQLTKRIKSYKSLEPHVVAAQKLKERGREVAPGMIIGYIITKGTKGISQRATPVEFARLEDYDPEYYIDNQILPAIQRIFEAIGYTRDYLKEGITQTSLSRWF

SEQ ID NO: 2590 - protein, 792 aa, unidentified
  REGION 1..792: note = Description of Unknown: Synthetic polypeptide
MPRILKGFLIDADFETVEGRALIRLFLRGEEGSFVVYDDSFSPYFYADPGDEPERVKERILASGAAEAIQKVEIEEKRLFGTPRVALRITVSHPQDVPRIRERIRRVEGVDLILEHDILFVRRRLIDRGIKPLTWLRLEVEERDGRALLRGVEQLEEEPPELRVAAVAIAVYNPKGAPRSSKDEIIMISVATSDGVEKVLTWREVQGLEQVEVLQDEKEMLLRFAELIKEGDYDVIVGYNTDSFDFPYIRDRLKKLGISLPLGRLDAELEVSRRGALPEARIRGRAHVDLYPIVRRHVKLNSYDLESVVEELLGIKKEKLDGERLFTYWDEGGEKRALLARYALEDARVTLALAEKFLPLYCELSTIVGQSLNDVARMTSGQLVEWLLMRYATPRGELIPNHPAGEEYAARARATYAGGYVREPKRGLVEHIAVFDFRSFGPSIIVSHNIDPSTLIVGNCEENRAPELEYCFSLEREGFIPAILKELIRRRAEIKRELKRSEGDRRRTLSFAEKALKILANSFYGYMGYPRARWYRRECAESVAAFARMYIKQVMRIAEEEFKLEVVYGDTDSLFVVIPPEKRELAQKFLQKVNESMPGIIELEFEGFYRRGLFVTKKRYALLSEDGKMVVKGLEFVRRDWAPIARETQKEVLRILLEEADPEKAARLVRDVIERIRQRRVSLEDITIYTQLTKRIKSYKSLEPHVVAAQKLKERGREVAPGMIIGYIITKGTKGISQRATPVEFARLEDYDPEYYIDNQILPAIQRIFEAIGYTRDYLKEGITQTSLSRDF

SEQ ID NO: 2591 - protein, 792 aa, unidentified
  REGION 1..792: note = Description of Unknown: Synthetic polypeptide
MPRILKGFLIDADFETVEGRALIRLFLRGEEGSFVVYDDSFSPYFYALPGDEPERVKERILASGAAEAIQKVEIEEKRLFGTPRVALRITVSHPQDVPRIRERIRRVEGVDLILEHDILFVRRRLIDRGIKPLTWLRLEVEERDGRALLRGVEQLEEEPPELRVAAVAIAVYNPKGAPRSSKDEIIMISVATSDGVEKVLTWREVQGLEQVEVLQDEKEMLLRFAELIKEGDYDVIVGYNTDSFDFPYIRDRLKKLGISLPLGRLDAELEVSRRGALPEARIRGRAHVDLYPIVRRHVKLNSYDLESVVEELLGIKKEKLDGERLFTYWDEGGEKRALLARYALEDARVTLALAEKFLPLYCELSTIVGQSLNDVARMTSGQLVEWLLMRYATPRGELIPNHPAGEEYAARARATYAGGYVREPKRGLVEHIAVFDFRSFGPSIIVSHNIDPSTLIVGNCEENRAPELEYCFSLEREGFIPAILKELIRRRAEIKRELKRSEGDRRRTLSFAEKALKILANSFYGYMGYPRARWYRRECAESVAAFARMYIKQVMRIAEEEFKLEVVYGDTDSLFVVIPPEKRELAQKFLQKVNESMPGILELEFEGFYRRGLFVTKKRYALLSEDGKMVVKGLEFVRRDWAPIARETQKEVLRILLEEADPEKAARLVRDVIERIRQRRVSLEDITIYTQLTKRIKSYKSLEPHVVAAQKLKERGREVAPGMIIGYIITKGTKGISQRATPVEFARLEDYDPEYYIDNQILPAIQRIFEAIGYTRDYLKEGITQTSLSRWF

SEQ ID NO: 2592 - protein, 792 aa, unidentified
  REGION 1..792: note = Description of Unknown: Synthetic polypeptide
MPRILKGFLIDADFETVEGRALIRLFLRGEEGSFVVYDDSFSPYFYALPGDEPERVKERILASGAAEAIQKVEIEEKRLFGTPRVALRITVSHPQDVPRIRERIRRVEGVDLILEHDILFVRRRLIDRGIKPLTWLRLEVEERDGRALLRGVEQLEEEPPELRVAAVAIAVYNPKGAPRSSKDEIIMISVATSDGVEKVLTWREVQGLEQVEVLQDEKEMLLRFAELIKEGDYDVIVGYNTDSFDFPYIRDRLKKLGISLPLGRLDAELEVSRRGALPEARIRGRAHVDLYPIVRRHVKLNSYDLESVVEELLGIKKEKLDGERLFTYWDEGGEKRALLARYALEDARVTLALAEKFLPLYCELSTIVGQSLNDVARMTSGQLVEWLLMRYATPRGELAPNHPAGEEYAARARATYAGGYVREPKRGLVEHIAVFDFRSFGPSIIVSHNIDPSTLIVGNCEENRAPELEYCFSLEREGFIPAILKELIRRRAEIKRELKRSEGDRRRTLSFAEKALKILANSFYGYMGYPRARWYRRECAESVAAFARMYIKQVMRIAEEEFKLEVVYGDTDSLFVVIPPEKRELAQKFLQKVNESMPGIIELEFEGFYRRGLFVTKKRYALLSEDGKMVVKGLEFVRRDWAPIARETQKEVLRILLEEADPEKAARLVRDVIERIRQRRVSLEDITIYTQLTKRIKSYKSLEPHVVAAQKLKERGREVAPGMIIGYIITKGTKGISQRATPVEFARLEDYDPEYYIDNQILPAIQRIFEAIGYTRDYLKEGITQTSLSRWF

SEQ ID NO: 2593 - protein, 792 aa, unidentified
  REGION 1..792: note = Description of Unknown: Synthetic polypeptide
MPRILKGFLIDADFETVEGRALIRLFLRGEEGSFVVYDDSFSPYFYALPGDEPERVKERILASGAAEAIQKVEIEEKRLFGTPRVALRITVSHPQDVPRIRERIRRVEGVDLILEHDILFVRRRLIDRGIKPLTWLRLEVEERDGRALLRGVEQLEEEPPELRVAAVVIAVYNPKGAPRSSKDEIIMISVATSDGVEKVLTWREVQGLEQVEVLQDEKEMLLRFAELIKEGDYDVIVGYNTDSFDFPYIRDRLKKLGISLPLGRLDAELEVSRRGALPEARIRGRAHVDLYPIVRRHVKLNSYDLESVVEELLGIKKEKLDGERLFTYWDEGGEKRALLARYALEDARVTLALAEKFLPLYCELSTIVGQSLNDVARMTSGQLVEWLLMRYATPRGELIPNHPAGEEYAARARATYAGGYVREPKRGLVEHIAVFDFRSFGPSIIVSHNIDPSTLIVGNCEENRAPELEYCFSLEREGFIPAILKELIRRRAEIKRELKRSEGDRRRTLSFAEKALKILANSFYGYMGYPRARWYRRECAESVAAFARMYIKQVMRIAEEEFKLEVVYGDTDSLFVVIPPEKRELAQKFLQKVNESMPGIIELEFEGFYRRGLFVTKKRYALLSEDGKMVVKGLEFVRRDWAPIARETQKEVLRILLEEADPEKAARLVRDVIERIRQRRVSLEDITIYTQLTKRIKSYKSLEPHVVAAQKLKERGREVAPGMIIGYIITKGTKGISQRATPVEFARLEDYDPEYYIDNQILPAIQRIFEAIGYTRDYLKEGITQTSLSRWF

SEQ ID NO: 2594 - protein, 792 aa, unidentified
  REGION 1..792: note = Description of Unknown: Synthetic polypeptide
MPRILKGFLIDADFETVEGRALIRLFLRGEEGSFVVYDDSFSPYFYADPGDEPERVKERILASGAAEAIQKVEIEEKRLFGTPRVALRITVSHPQDVPRIRERIRRVEGVDLILEHDILFVRRRLIDRGIKPLTWLRLEVEERDGRALLRGVEQLEEEPPELRVAAVAIAVYNPKGAPRSSKDEIIMISVATSDGVEKVLTWREVQGLEQVEVLQDEKEMLLRFAELIKEGDYDVIVGYNTDSFDFPYIRDRLKKLGISLPLGRLDAELEVSRRNALPEARIRGRAHVDLYPIVRRHVKLNSYDLESVVEELLGIKKEKLDGERLFTYWDEGGEKRALLARYALEDARVTLALAEKFLPLYCELSTIVGQSLNDVARMTSGQLVEWLLMRYATPRGELIPNHPAGEEYAARARATYAGGYVREPKRGLVEHIAVFDFRSFGPSIIVSHNIDPSTLIVGNCEENRAPELEYCFSLEREGFIPAILKELIRRRAEIKRELKRSEGDRRRTLSFAEKALKILANSFYGYMGYPRARWYRRECAESVAAFARMYIKQVMRIAEEEFKLEVVYGDTDSLFVVIPPEKRELAQKFLQKVNESMPGIIELEFEGFYRRGLFVTKKRYALLSEDGKMVVKGLEFVRRDWAPIARETQKEVLRILLEEADPEKAARLVRDVIERIRQRRVSLEDITIYTQLTKRIKSYKSLEPHVVAAQKLKERGREVAPGMIIGYIITKGTKGISQRATPVEFARLEDYDPEYYIDNQILPAIQRIFEAIGYTRDYLKEGITQTSLSRWF

SEQ ID NO: 2595 - protein, 792 aa, unidentified
  REGION 1..792: note = Description of Unknown: Synthetic polypeptide
MPRILKGFLIDADFETVEGRALIRLFLRGEEGSFVVYDDSFSPYFYALPGDEPERVKERILASGAAEAIQKVEIEEKRLFGTPRVALRITVSHPQDVPRIRERIRRVEGVDLILEHDILFVRRYLIDRGIKPLTWLRLEVEERDGRALLRGVEQLEEEPPELRVAAVAIAVYNPKGAPRSSKDEIIMISVATSDGVEKVLTWREVQGLEQVEVLQDEKEMLLRFAELIKEGDYDVIVGYNTDSFDFPYIRDRLKKLGISLPLGRLDAELEVSRRGALPEARIRGRAHVDLYPIVRRHVKLNSYDLESVVEELLGIKKEKLDGERLFTYWDEGGEKRALLARYALEDARVTLALAEKFLPLYCELSTIVGQSLNDVARMTSGQLVEWLLMRYATPRGELIPNHPAGEEYAARARATYAGGYVREPKRGLVEHIAVFDFRSFGPSIIVSHNIDPSTLIVGNCEENRAPELEYCFSLEREGFIPAILKELIRRRAEIKRELKRSEGDRRRTLSFAEKALKILANSFYGYMGYPRARWYRRECARSVAAFARMYIKQVMRIAEEEFKLEVVYGDTDSLFVVIPPEKRELAQKFLQKVNESMPGIIELEFEGFYRRGLFVTKKRYALLSEDGKMVVKGLEFVRRDWAPIARETQKEVLRILLEEADPEKAARLVRDVIERIRQRRVSLEDITIYTQLTKRIKSYKSLEPHVVAAQKLKERGREVAPGMIIGYIITKGTKGISQRATPVEFARLEDYDPEYYIDNQILPAIQRIFEAIGYTRDYLKEGITQTSLSRWF

SEQ ID NO: 2596 - protein, 792 aa, unidentified
  REGION 1..792: note = Description of Unknown: Synthetic polypeptide
MPRILKGFLIDADFETVEGRALIRLFLRGEEGSFVVYDDSFSPYFYALPGDEPERVKERILASGAAEAIQKVEIEEKRLFGTPRVALRITVSHPQDVPRIRERIRRVEGVDLILEHDILFVRRRLIDRGIKPLTWLRLEVEERDGRALLRGVEQLEEEPPELRVAAVAIAVYNPKGAPRSSKDEIIMISVATSDGVEKVLTWREVQGLEQVEVLQDEKEMLLRFAELIKEGDYDVIVGYNTDSFDFPYIRDRLKKLGISLPLGRLDAELEVSRRGALPEARIRGRAHVDLYPIVRRHVKLNSYDLESVVEELLGIKKEKLDGERLFTYWDEGGEKRALLARYALEDARVTLALAEKFLPLYCELSTIVGQSLNDVARMTSGQLVEWLLMRYATPRGELIPNHPAGEEYAARARATYAGGYVREPKRGLVEHIAVFDFRSFGPSIIVSHNIDPSTLIVGNCEENRAPELEYCFSLEREGFIPAILKELIRRRAEIKRELKRSEGDRRRTLSFAEKALKILANSFYGYMGYPRARWYRRECAESVAAFARMYIKQVMRIAEEEFKLEVVYGDTDSLFVVIPPEKRELAQKFLQKVNESMPGIIELEFEGFYRRGLFVTKKRYALLSEDGKMVVKGLEFVRRDWAPIARETQKEVLRILLEEADPEKAARLVRDVIERIRQRRVSLEDITIYTQLTKRIKSYKSLEPHVVAAQKLKERGREVAPGMIIGYIITKGTKGISQRAIPVEFARLEDYDPEYYIDNQILPAIQRIFEAIGYTRDYLKEGITQTSLSRWF

SEQ ID NO: 2597 - protein, 792 aa, unidentified
  REGION 1..792: note = Description of Unknown: Synthetic polypeptide
MPRILKGFLIDADFETVEGRALIRLFLRGEEGSFVVYDDSFSPYFYALPGDEPERVKERILASGAAEAIQKVEIEEKRLFGTPRVALRITVSHPQDVPRIRERIRRVEGVDLILEHDILFVRRRLIDRGIKPLTWLRLEVEERDGRALLRGVEQLEEEPPELRVAAVLIAVYNPKGAPRSSKDEIIMISVATSDGVEKVLTWREVQGLEQVEVLQDEKEMLLRFAELIKEGDYDVIVGYNTDSFDFPYIRDRLKKLGISLPLGRLDAELEVSRRGALPEARIRGRAHVDLYPIVRRHVKLNSYDLESVVEELLGIKKEKLDGERLFTYWDEGGEKRALLARYALEDARVTLALAEKFLPLYCELSTIVGQSLNDVARMTSGQLVEWLLMRYATPRGELIPNHPAGEEYAARARATYAGGYVREPKRGLVEHIAVFDFRSFGPSIIVSHNIDPSTLIVGNCEENRAPELEYCFSLEREGFIPAILKELIRRRAEIKRELKRSEGDRRRTLSFAEKALKILANSFYGYMGYPRARWYRRECAESVAAFARMYIKQVMRIAEEEFKLEVVYGDTDSLFVVIPPEKRELAQKFLQKVNESMPGIIELEFEGFYRRGLFVTKKRYALLSEDGKMVVKGLEFVRRDWAPIARETQKEVLRILLEEADPEKAARLVRDVIERIRQRRVSLEDITIYTQLTKRIKSYKSLEPHVVAAQKLKERGREVAPGMIIGYIITKGTKGISQRATPVEFARLEDYDPEYYIDNQILPAIQRIFEAIGYTRDYLKEGITQTSLSRWF

SEQ ID NO: 2598 - protein, 782 aa, unidentified
  REGION 1..782: note = Description of Unknown: Synthetic polypeptide
MPRILKGFLIDADFETVEGRALIRLFLRGEEGSFVVYDDSFSPYFYALPGDEPERVKERILASGAAEAIQKVEIEEKRLFGTPRVALRITVSHPQDVPRIRERIRRVEGVDLILEHDILFVRRYLIDRGIKPLTWRALLRGVEQLEEEPPELRVAAVAIAVYNPKGAPRSSKDEIIMISVATSDGVEKVLTWREVQGLEQVEVLQDEKEMLLRFAELIKEGDYDVIVGYNTDSFDFPYIRDRLKKLGISLPLGRLDAELEVSRRGALPEARIRGRAHVDLYPIVRRHVKLNSYDLESVVEELLGIKKEKLDGERLFTYWDEGGEKRALLARYALEDARVTLALAEKFLPLYCELSTIVGQSLNDVARMTSGQLVEWLLMRYATPRGELIPNHPAGEEYAARARATYAGGYVREPKRGLVEHIAVFDFRSFGPSIIVSHNIDPSTLIVGNCEENRAPELEYCFSLEREGFIPAILKELIRRRAEIKRELKRSEGDRRRTLSFAEKALKILANSFYGYMGYPRARWYRRECAESVAAFARMYIKQVMRIAEEEFKLEVVYGDTDSLFVVIPPEKRELAQKFLQKVNESMPGIIELEFEGFYRRGLFVTKKRYALLSEDGKMVVKGLEFVRRDWAPIARETQKEVLRILLEEADPEKAARLVRDVIERIRQRRVSLEDITIYTQLTKRIKSYKSLEPHVVAAQKLKERGREVAPGMIIGYIITKGTKGISQRATPVEFARLEDYDPEYYIDNQILPAIQRIFEAIGYTRDYLKEGITQTSLSRWF

SEQ ID NO: 2599 - protein, 792 aa, unidentified
  REGION 1..792: note = Description of Unknown: Synthetic polypeptide
MPRILKGFLIDADFETVEGRALIRLFLRGEEGSFVVYDDSFSPYFYALPGDEPERVKERILASGAAEAIQKVEIEEKRLFGTPRVALRITVSHPQDVPRIRERIRRVEGVDLILEHDILFVRRRLIDRGIKPLTWLRLEVEERDGRALLRGVEQLEEEPPELRVAAVAIAVYNPKGAPRSSKDEIIMISVATSDGVEKVLTWREVQGLEQVEVLQDEKEMLLRFAELIKEGDYDVIVGYNTDSFDFPYIRDRLKKLGISLPLGRLDAELEVSRRGALPEARIRGRAHVDLYPIVRRHVKLNSYDLESVVEELLGIKKEKLDGERLFTYWDEGGEKRALLARYALEDARVTLALAEKFLPLYCELSTIVGQSLNDVSRMTSGQLVEWLLMRYATPRGELIPNHPAGEEYAARARATYAGGYVREPKRGLVEHIAVFDFRSFGPSIIVSHNIDPSTLIVGNCEENRAPELEYCFSLEREGFIPAILKELIRRRAEIKRELKRSEGDRRRTLSFAEKALKILANSFYGYMGYPRARWYRRECAESVAAFARMYIKQVMRIAEEEFKLEVVYGDTDSLFVVIPPEKRELAQKFLQKVNESMPGIIELEFEGFYRRGLFVTKKRYALLSEDGKMVVKGLEFVRRDWAPIARETQKEVLRILLEEADPEKAARLVRDVIERIRQRRVSLEDITIYTQLTKRIKSYKSLEPHVVAAQKLKERGREVAPGMIIGYIITKGTKGISQRATPVEFARLEDYDPEYYIDNQILPAIQRIFEAIGYTRDYLKEGITQTSLSRWF

SEQ ID NO: 2600 - protein, 792 aa, unidentified
  REGION 1..792: note = Description of Unknown: Synthetic polypeptide
MPRILKGFLIDADFETVEGRALIRLFLRGEEGSFVVYDDSFSPYFYALPGDEPERVKERILASGAAEAIQKVEIEEKRLFGTPRVALRITVSHPQDVPRIRERIRRVEGVDLILEHDILFVRRYLIDRGIKPLTWLRLEVEERDGRALLRGVEQLEEEPPELRVAAVAIAVYNPKGAPRSSKDEIIMISVATSDGVEKVLTWREVQGLEQVEVLQDEKEMLLRFAELIKEGDYDVIVGYNTDSFDFPYIRDRLKKLGISLPLGRLDAELEVSRRGALPEARIRGRAHVDLYPIVRRHVKLNSYWLESVVEELLGIKKEKLDGERLFTYWDEGGEKRALLARYALEDARVTLALAEKFLPLYCELSTIVGQSLNDVARMTSGQLVEWLLMRYATPRGELIPNHPAGEEYAARARATYAGGYVREPKRGLVEHIAVFDFRSFGPSIIVSHNIDPSTLIVGNCEENRAPELEYCFSLEREGFIPAILKELIRRRAEIKRELKRSEGDRRRTLSFAEKALKILANSFYGYMGYPRARWYRRECAESVAAFARMYIKQVMRIAEEEFKLEVVYGDTDSLFVVIPPEKRELAQKFLQKVNESMPGIIELEFEGFYRRGLFVTKKRYALLSEDGKMVVKGLEFVRRDWAPIARETQKEVLRILLEEADPEKAARLVRDVIERIRQRRVSLEDITIYTQLTKRIKSYKSLEPHVVAAQKLKERGREVAPGMIIGYIITKGTKGISQRATPVEFARLEDYDPEYYIDNQILPAIQRIFEAIGYTRDYLKEGITQTSLSRWF

SEQ ID NO: 2601 - protein, 792 aa, unidentified
  REGION 1..792: note = Description of Unknown: Synthetic polypeptide
MPRILKGFLIDADFETVEGRALIRLFLRGEEGSFVVYDDSFSPYFYALPGDEPERVKERILASGAAEAIQKVEIEEKRLFGTPRVALRITVSHPQDVPRIRERIRRVEGVDLILEHDILFVRRRLIDRGIKPLTWLRLEVEERDGRALLRGVEQLEEEPPELRVAAVAIAVYNRKGAPRSSKDEIIMISVATSDGVEKVLTWREVQGLEQVEVLQDEKEMLLRFAELIKEGDYDVIVGYNTDSFDFPYIRDRLKKLGISLPLGRLDAELEVSRRGALPEARIRGRAHVDLYPIVRRHVKLNSYDLESVVEELLGIKKEKLDGERLFTYWDEGGEKRALLARYALEDARVTLALAEKFLPLYCELSTIVGQSLNDVARMTSGQLVEWLLMRYATPRGELIPNHPAGEEYAARARATYAGGYVREPKRGLVEHIAVFDFRSFGPSIIVSHNIDPSTLIVGNCEENRAPELEYCFSLEREGFIPAILKELIRRRAEIKRELKRSEGDRRRTLSFAEKALKILANSFYGYMGYPRARWYRRECAESVAAFARMYIKQVMRIAEEEFKLEVVYGDTDSLFVVIPPEKRELAQKFLQKVNESMPGIIELEFEGFYRRGLFVTKKRYALLSEDGKMVVKGLEFVRRDWAPIARETQKEVLRILLEEADPEKAARLVRDVIERIRQRRVSLEDITIYTQLTKRIKSYKSLEPHVVAAQKLKERGREVAPGMIIGYIITKGTKGISQRATPVEFARLEDYDPEYYIDNQILPAIQRIFEAIGYTRDYLKEGITQTSLSRWF

SEQ ID NO: 2602 - protein, 792 aa, unidentified
  REGION 1..792: note = Description of Unknown: Synthetic polypeptide
MPRILKGFLIDADFETVEGRALIRLFLRGEEGSFVVYDDSFSPYFYALPGDEPERVKERILASGAAEAIQKVEIEEKRLFGTPRVALRITVSHPQDVPRIRERIRRVEGVDLILEHDILFVRRRLIDRGIKPLTWLRLEVEERDGRALLRGVEQLEEEPPELRVAAVAIAVYNPKGAPRSSKDEIIMISVATSDGVEKVLTWREVQGLEQVEVLQDEKEMLLRFAELIKEGDYDVIVGYNTDSFDFPYIRDRLKKLGISLPLGRLDAELEVSRRGALPEARIRGRAHVDLYPIVRRHVKLNSYDLESVVEELLGIKKEKLDGERLFTYWDEGGEKRALLARYALEDARVTLALAEKFLPLYCELSTIVGQSLNDVARMTSGQLVEWLLMRYATPRGELIPNHPAGEEYAARARATYAGGYVREPKRGLVEHIAVFDFRSFGPSIIVSHNIDPSTLIVGNCEENRAPELEYCFSLEREGFIPAILKELIRRRAEIKRELKRSEGDRRRTLSFAEKALKILANSFYGYMGYPRARWYRRECAESVAAFARMYIKQVMRIAEEEFKLEVVYGDTDSLFVVIPPEKRELAQKFLQKVNESMPGIIELEFEGFYRRGLFVTKKRYALLSEDGKMVVKGLEFVRRDWAPIARETQKEVLRILLEEADPEKAARLVRDVIERIRQRRVSLEDITIYTTLTKRIKSYKSLEPHVVAAQKLKERGREVAPGMIIGYIITKGTKGISQRATPVEFARLEDYDPEYYIDNQILPAIQRIFEAIGYTRDYLKEGITQTSLSRWF

SEQ ID NO: 2603 - protein, 792 aa, unidentified
  REGION 1..792: note = Description of Unknown: Synthetic polypeptide
MPRILKGFLIDADFETVEGRALIRLFLRGEEGSFVVYDDSFSPYFYALPGDEPERVKERILASGAAEAIQKVEIEEKRLFGTPRVALRITVSHPQDVPRIRERIRRVEGVDLILEHDILFVRRRLIDRGIKPLTWLRLEVEERDGRALLRGVEQLEEEPPELRVAAVAIAVYNPKGAPRSSKDEIIMISVATSDGVEKVLTWREVQGLEQVEVLQDEKEMLLRFAELIKEGDYDVLVGYNTDSFDFPYIRDRLKKLGISLPLGRLDAELEVSRRGALPEARIRGRAHVDLYPIVRRHVKLNSYDLESVVEELLGIKKEKLDGERLFTYWDEGGEKRALLARYALEDARVTLALAEKFLPLYCELSTIVGQSLNDVARMTSGQLVEWLLMRYATPRGELIPNHPAGEEYAARARATYAGGYVREPKRGLVEHIAVFDFRSFGPSIIVSHNIDPSTLIVGNCEENRAPELEYCFSLEREGFIPAILKELIRRRAEIKRELKRSEGDRRRTLSFAEKALKILANSFYGYMGYPRARWYRRECAESVAAFARMYIKQVMRIAEEEFKLEVVYGDTDSLFVVIPPEKRELAQKFLQKVNESMPGIIELEFEGFYRRGLFVTKKRYALLSEDGKMVVKGLEFVRRDWAPIARETQKEVLRILLEEADPEKAARLVRDVIERIRQRRVSLEDITIYTQLTKRIKSYKSLEPHVVAAQKLKERGREVAPGMIIGYIITKGTKGISQRATPVEFARLEDYDPEYYIDNQILPAIQRIFEAIGYTRDYLKEGITQTSLSRWF

SEQ ID NO: 2604 - protein, 792 aa, unidentified
  REGION 1..792: note = Description of Unknown: Synthetic polypeptide
MPRILKGFLIDADFETVEGRALIRLFLRGEEGSFVVYDDSFSPYFYALPGDEPERVKERILASGAAEAIQKVEIEEKRLFGTPRVALRITVSHPQDVPRIRERIRRVEGVDLILEHDILFVRRRLIDRGIKPLTWLRLEVEERDGRALLRGVEQLEEEPPELRVAAVAIAVYNPKGAPRSSKDEIIMISVATSDGVEKVLTWREVQGLEQVEVLQDEKEMLLRFAELIKEGDYDVIVGYNTDSFDFPYIRDRLKKLGISLPLGRLDAELEVSRRGALPEARIRGRAHVDLYPIVRRHVKLNSYDLESVVEELLGIKKEKLDGERLFTYWDEGGEKRALLARYALEDARVTLALAEKFLPLYCELSTIVGQSLNDVARATSGQLVEWLLMRYATPRGELIPNHPAGEEYAARARATYAGGYVREPKRGLVEHIAVFDFRSFGPSIIVSHNIDPSTLIVGNCEENRAPELEYCFSLEREGFIPAILKELIRRRAEIKRELKRSEGDRRRTLSFAEKALKILANSFYGYMGYPRARWYRRECAESVAAFARMYIKQVMRIAEEEFKLEVVYGDTDSLFVVIPPEKRELAQKFLQKVNESMPGIIELEFEGFYRRGLFVTKKRYALLSEDGKMVVKGLEFVRRDWAPIARETQKEVLRILLEEADPEKAARLVRDVIERIRQRRVSLEDITIYTQLTKRIKSYKSLEPHVVAAQKLKERGREVAPGMIIGYIITKGTKGISQRATPVEFARLEDYDPEYYIDNQILPAIQRIFEAIGYTRDYLKEGITQTSLSRWF

SEQ ID NO: 2605 - protein, 792 aa, unidentified
  REGION 1..792: note = Description of Unknown: Synthetic polypeptide
MPRILKGFLIDADFETVEGRALIRLFLRGEEGSFVVYDDSFSPYFYALPGDEPERVKERILASGAAEAIQKVEIEEKRLFGTPRVALRITVSHPQDVPRIRERIRRVEGVDLILEHDILFVRRYLIDRGIKPLTWLRLEVEERDGRALLRGVEQLEEEPPELRVAAVAIAVYNPKGAPRSSKDEIIMISVATSDGVEKVLTWREVQGLEQVEVLQDEKEMLLRFAELIKEGDYDVIVGYNTDSFDFPYIRDRLKKLGISLPLGRLDAELEVSRRGALPEARIRGRAHVDLYPIVRRHVKLNSYFLESVVEELLGIKKEKLDGERLFTYWDEGGEKRALLARYALEDARVTLALAEKFLPLYCELSTIVGQSLNDVARMTSGQLVEWLLMRYATPRGELIPNHPAGEEYAARARATYAGGYVREPKRGLVEHIAVFDFRSFGPSIIVSHNIDPSTLIVGNCEENRAPELEYCFSLEREGFIPAILKELIRRRAEIKRELKRSEGDRRRTLSFAEKALKILANSFYGYMGYPRARWYRRECAESVAAFARMYIKQVMRIAEEEFKLEVVYGDTDSLFVVIPPEKRELAQKFLQKVNESMPGIIELEFEGFYRRGLFVTKKRYALLSEDGKMVVKGLEFVRRDWAPIARETQKEVLRILLEEADPEKAARLVRDVIERIRQRRVSLEDITIYTQLTKRIKSYKSLEPHVVAAQKLKERGREVAPGMIIGYIITKGTKGISQRATPVEFARLEDYDPEYYIDNQILPAIQRIFEAIGYTRDYLKEGITQTSLSRWF

SEQ ID NO: 2606 - protein, 792 aa, unidentified; identical to SEQ ID NO: 1725
  REGION 1..792: note = Description of Unknown: Synthetic polypeptide

SEQ ID NO: 2607 - protein, 792 aa, unidentified
  REGION 1..792: note = Description of Unknown: Synthetic polypeptide
MPRILKGFLIDADFETVEGRALIRLFLRGEEGSFVVYDDSFSPYFYALPGDEPERVKERILASGAAEAIQKVEIEEKRLFGTPRVALRITVSHPQDVPRIRERIRRVEGVDLILEHDILFVRRRLIDRGIKPLTWLRLEVEERDGRALLRGVEQLEEEPPELRVAAVAIAVYNPKGAPRSSKDEIIMISVATSDGVEKVLTWREVQGLEQVEVLQDEKEMLLRFAELIKEGDYDVIVGYNTDSFDFPYIRDRLKKLGISLPLGRLDAELEVSRRGALPEARIRGRAHVDLYPIVRRHVKLNSYDLESVVEELFGIKKEKLDGERLFTYWDEGGEKRALLARYALEDARVTLALAEKFLPLYCELSTIVGQSLNDVARMTSGQLVEWLLMRYATPRGELIPNHPAGEEYAARARATYAGGYVREPKRGLVEHIAVFDFRSFGPSIIVSHNIDPSTLIVGNCEENRAPELEYCFSLEREGFIPAILKELIRRRAEIKRELKRSEGDRRRTLSFAEKALKILANSFYGYMGYPRARWYRRECAESVAAFARMYIKQVMRIAEEEFKLEVVYGDTDSLFVVIPPEKRELAQKFLQKVNESMPGIIELEFEGFYRRGLFVTKKRYALLSEDGKMVVKGLEFVRRDWAPIARETQKEVLRILLEEADPEKAARLVRDVIERIRQRRVSLEDITIYTQLTKRIKSYKSLEPHVVAAQKLKERGREVAPGMIIGYIITKGTKGISQRATPVEFARLEDYDPEYYIDNQILPAIQRIFEAIGYTRDYLKEGITQTSLSRWF

SEQ ID NO: 2608 - protein, 792 aa, unidentified
  REGION 1..792: note = Description of Unknown: Synthetic polypeptide
MPRILKGFLIDADFETVEGRALIRLFLRGEEGSFVVYDDSFSPYFYALPGDEPERVKERILASGAAEAIQKVEIEEKRLFGTPRVALRITVSHPQDVPRIRERIRRVEGVDLILEHDILFVRRRLIDRGIKPLTWLRLEVEERDGRALLRGVEQLEEEPPELRVAAVAIAVYNPKGAPRSSKDEIIMISVATSDGVEKVLTWREVQGLEQVEVLQDEKEMLLRFAELIKEGDYDVIVGYNTDSFDFPYIRDRLKKLGISLPLGRLDAELEVSRRGALPEARIRGRAHVDLYPIVRRHVKLNSYDLESVVEELLSIKKEKLDGERLFTYWDEGGEKRALLARYALEDARVTLALAEKFLPLYCELSTIVGQSLNDVARMTSGQLVEWLLMRYATPRGELIPNHPAGEEYAARARATYAGGYVREPKRGLVEHIAVFDFRSFGPSIIVSHNIDPSTLIVGNCEENRAPELEYCFSLEREGFIPAILKELIRRRAEIKRELKRSEGDRRRTLSFAEKALKILANSFYGYMGYPRARWYRRECAESVAAFARMYIKQVMRIAEEEFKLEVVYGDTDSLFVVIPPEKRELAQKFLQKVNESMPGIIELEFEGFYRRGLFVTKKRYALLSEDGKMVVKGLEFVRRDWAPIARETQKEVLRILLEEADPEKAARLVRDVIERIRQRRVSLEDITIYTQLTKRIKSYKSLEPHVVAAQKLKERGREVAPGMIIGYIITKGTKGISQRATPVEFARLEDYDPEYYIDNQILPAIQRIFEAIGYTRDYLKEGITQTSLSRWF

SEQ ID NO: 2609 - protein, 792 aa, unidentified
  REGION 1..792: note = Description of Unknown: Synthetic polypeptide
MPRILKGFLIDADFETVEGRALIRLFLRGEEGSFVVYDDSFSPYFYALPGDEPERVKERILASGAAEAIQKVEIEEKRLFGTPRVALRITVSHPQDVPRIRERIRRVEGVDLILEHDILFVRRRLIDRGIKPLTWLRLEVEERDGRALLRGVEQLEEEPPELRVAAVAIAVYNPKGAPRSSKDEIIMISVATSDGVEKVLTWREVQGLEQVEVLQDEKEMLLRFAELIKEGDYDVIVGYNTDSFDFPYIRDRLKKLGISFPLGRLDAELEVSRRGALPEARIRGRAHVDLYPIVRRHVKLNSYDLESVVEELLGIKKEKLDGERLFTYWDEGGEKRALLARYALEDARVTLALAEKFLPLYCELSTIVGQSLNDVARMTSGQLVEWLLMRYATPRGELIPNHPAGEEYAARARATYAGGYVREPKRGLVEHIAVFDFRSFGPSIIVSHNIDPSTLIVGNCEENRAPELEYCFSLEREGFIPAILKELIRRRAEIKRELKRSEGDRRRTLSFAEKALKILANSFYGYMGYPRARWYRRECAESVAAFARMYIKQVMRIAEEEFKLEVVYGDTDSLFVVIPPEKRELAQKFLQKVNESMPGIIELEFEGFYRRGLFVTKKRYALLSEDGKMVVKGLEFVRRDWAPIARETQKEVLRILLEEADPEKAARLVRDVIERIRQRRVSLEDITIYTQLTKRIKSYKSLEPHVVAAQKLKERGREVAPGMIIGYIITKGTKGISQRATPVEFARLEDYDPEYYIDNQILPAIQRIFEAIGYTRDYLKEGITQTSLSRWF

SEQ ID NO: 2610 - protein, 792 aa, unidentified
  REGION 1..792: note = Description of Unknown: Synthetic polypeptide
MPRILKGFLIDADFETVEGRALIRLFLRGEEGSFVVYDDSFSPYFYALPGDEPERVKERILASGAAEAIQKVEIEEKRLFGTPRVALRITVSHPQDVPRIRERIRRVEGVDLILEHDILFVRRRLIDRGLKPLTWLRLEVEERDGRALLRGVEQLEEEPPELRVAAVAIAVYNPKGAPRSSKDEIIMISVATSDGVEKVLTWREVQGLEQVEVLQDEKEMLLRFAELIKEGDYDVIVGYNTDSFDFPYIRDRLKKLGISLPLGRLDAELEVSRRGALPEARIRGRAHVDLYPIVRRHVKLNSYDLESVVEELLGIKKEKLDGERLFTYWDEGGEKRALLARYALEDARVTLALAEKFLPLYCELSTIVGQSLNDVARMTSGQLVEWLLMRYATPRGELIPNHPAGEEYAARARATYAGGYVREPKRGLVEHIAVFDFRSFGPSIIVSHNIDPSTLIVGNCEENRAPELEYCFSLEREGFIPAILKELIRRRAEIKRELKRSEGDRRRTLSFAEKALKILANSFYGYMGYPRARWYRRECAESVAAFARMYIKQVMRIAEEEFKLEVVYGDTDSLFVVIPPEKRELAQKFLQKVNESMPGIIELEFEGFYRRGLFVTKKRYALLSEDGKMVVKGLEFVRRDWAPIARETQKEVLRILLEEADPEKAARLVRDVIERIRQRRVSLEDITIYTQLTKRIKSYKSLEPHVVAAQKLKERGREVAPGMIIGYIITKGTKGISQRATPVEFARLEDYDPEYYIDNQILPAIQRIFEAIGYTRDYLKEGITQTSLSRWF

SEQ ID NO: 2611 - protein, 792 aa, unidentified
  REGION 1..792: note = Description of Unknown: Synthetic polypeptide
MPRILKGFLIDADFETVEGRALIRLFLRGEEGSFVVYDDSFSPYFYALPGDEPERVKERILASGAAEAIQKVEIEEKRLFGTPRVALRITVSHPQDVPRIRERIRRVEGVDLILEHDILFVRRRLIDRGIKPLTWLRLEVEERDGRALLRGVEQLEEEPPELRVAAVAIFVYNPKGAPRSSKDEIIMISVATSDGVEKVLTWREVQGLEQVEVLQDEKEMLLRFAELIKEGDYDVIVGYNTDSFDFPYIRDRLKKLGISLPLGRLDAELEVSRRGALPEARIRGRAHVDLYPIVRRHVKLNSYDLESVVEELLGIKKEKLDGERLFTYWDEGGEKRALLARYALEDARVTLALAEKFLPLYCELSTIVGQSLNDVARMTSGQLVEWLLMRYATPRGELIPNHPAGEEYAARARATYAGGYVREPKRGLVEHIAVFDFRSFGPSIIVSHNIDPSTLIVGNCEENRAPELEYCFSLEREGFIPAILKELIRRRAEIKRELKRSEGDRRRTLSFAEKALKILANSFYGYMGYPRARWYRRECAESVAAFARMYIKQVMRIAEEEFKLEVVYGDTDSLFVVIPPEKRELAQKFLQKVNESMPGIIELEFEGFYRRGLFVTKKRYALLSEDGKMVVKGLEFVRRDWAPIARETQKEVLRILLEEADPEKAARLVRDVIERIRQRRVSLEDITIYTQLTKRIKSYKSLEPHVVAAQKLKERGREVAPGMIIGYIITKGTKGISQRATPVEFARLEDYDPEYYIDNQILPAIQRIFEAIGYTRDYLKEGITQTSLSRWF

SEQ ID NO: 2612 - protein, 792 aa, unidentified
  REGION 1..792: note = Description of Unknown: Synthetic polypeptide
MPRILKGFLIDADFETVEGRALIRLFLRGEEGSFVVYDDSFSPYFYALPGDEPERVKERILASGAAEAIQKVEIEEKRLFGTPRVALRITVSHPQDVPRIRERIRRVEGVDLILEHDILFVRRRLIDRGIKPLTWLRLEVEERDGRALLRGVEQLEEEPPELRVAAVAIAVYNPKGAPRSSKDEIIMISVATSDGVEKVLTWREVQGLEQVEVLQDEKEMLLRFAELIKEGDYDVIVGYNTDSFDFPYIRDRLKKLGISLPLGRLDAELEVSRRGALPEARIRGRAHVDLYPIVRRHVKLNSYDLESVVEELLGIKKEKLDGERLFTYWDEGGEKRALVARYALEDARVTLALAEKFLPLYCELSTIVGQSLNDVARMTSGQLVEWLLMRYATPRGELIPNHPAGEEYAARARATYAGGYVREPKRGLVEHIAVFDFRSFGPSIIVSHNIDPSTLIVGNCEENRAPELEYCFSLEREGFIPAILKELIRRRAEIKRELKRSEGDRRRTLSFAEKALKILANSFYGYMGYPRARWYRRECAESVAAFARMYIKQVMRIAEEEFKLEVVYGDTDSLFVVIPPEKRELAQKFLQKVNESMPGIIELEFEGFYRRGLFVTKKRYALLSEDGKMVVKGLEFVRRDWAPIARETQKEVLRILLEEADPEKAARLVRDVIERIRQRRVSLEDITIYTQLTKRIKSYKSLEPHVVAAQKLKERGREVAPGMIIGYIITKGTKGISQRATPVEFARLEDYDPEYYIDNQILPAIQRIFEAIGYTRDYLKEGITQTSLSRWF

SEQ ID NO: 2613 - protein, 792 aa, unidentified
  REGION 1..792: note = Description of Unknown: Synthetic polypeptide
MPRILKGFLIDADFETVEGRALIRLFLRGEEGSFVVYDDSFSPYFYALPGDEPERVKERILASGAAEAIQKVEIEEKRLFGTPRVALRITVSHPQDVPRIRERIRRVEGVDLILEHDILFVRRRLIDRGIKPLTWLRLEVEERDGRALLRGVEQLEEEPPELRVAAVAIAVYNPKGAPRSSKDEIIMISVATSDGVEKVLTWREVQGLEQVEVLQDEKEMLLRFAELIKEGDYDVIVGYNTDSFDFPYIRDRLKKLGISLPLGRLDAELEVSRRGALPEARIRGRAHVDLYPIIRRHVKLNSYDLESVVEELLGIKKEKLDGERLFTYWDEGGEKRALLARYALEDARVTLALAEKFLPLYCELSTIVGQSLNDVARMTSGQLVEWLLMRYATPRGELIPNHPAGEEYAARARATYAGGYVREPKRGLVEHIAVFDFRSFGPSIIVSHNIDPSTLIVGNCEENRAPELEYCFSLEREGFIPAILKELIRRRAEIKRELKRSEGDRRRTLSFAEKALKILANSFYGYMGYPRARWYRRECAESVAAFARMYIKQVMRIAEEEFKLEVVYGDTDSLFVVIPPEKRELAQKFLQKVNESMPGIIELEFEGFYRRGLFVTKKRYALLSEDGKMVVKGLEFVRRDWAPIARETQKEVLRILLEEADPEKAARLVRDVIERIRQRRVSLEDITIYTQLTKRIKSYKSLEPHVVAAQKLKERGREVAPGMIIGYIITKGTKGISQRATPVEFARLEDYDPEYYIDNQILPAIQRIFEAIGYTRDYLKEGITQTSLSRWF

SEQ ID NO: 2614 - protein, 792 aa, unidentified
  REGION 1..792: note = Description of Unknown: Synthetic polypeptide
MPRILKGFLIDADFETVEGRALIRLFLRGEEGSFVVYDDSFSPYFYALPGDEPERVKERILASGAAEAIQKVEIEEKRLFGTPRVALRITVSHPQDVPRIRERIRRVEGVDLILEHDILFVRRRLIDRGIKPLTWLRLEVEERDGRALLRGVEQLEEEPPELRVAAVVIVVYNPKGAPRSSKDEIIMISVATSDGVEKVLTWREVQGLEQVEVLQDEKEMLLRFAELIKEGDYDVIVGYNTDSFDFPYIRDRLKKLGISLPLGRLDAELEVSRRGALPEARIRGRAHVDLYPIVRRHVKLNSYDLESVVEELLGIKKEKLDGERLFTYWDEGGEKRALLARYALEDARVTLALAEKFLPLYCELSTIVGQSLNDVARMTSGQLVEWLLMRYATPRGELIPNHPAGEEYAARARATYAGGYVREPKRGLVEHIAVFDFRSFGPSIIVSHNIDPSTLIVGNCEENRAPELEYCFSLEREGFIPAILKELIRRRAEIKRELKRSEGDRRRTLSFAEKALKILANSFYGYMGYPRARWYRRECAESVAAFARMYIKQVMRIAEEEFKLEVVYGDTDSLFVVIPPEKRELAQKFLQKVNESMPGIIELEFEGFYRRGLFVTKKRYALLSEDGKMVVKGLEFVRRDWAPIARETQKEVLRILLEEADPEKAARLVRDVIERIRQRRVSLEDITIYTQLTKRIKSYKSLEPHVVAAQKLKERGREVAPGMIIGYIITKGTKGISQRATPVEFARLEDYDPEYYIDNQILPAIQRIFEAIGYTRDYLKEGITQTSLSRWF

SEQ ID NO: 2615 - protein, 792 aa, unidentified; identical to SEQ ID NO: 1725
  REGION 1..792: note = Description of Unknown: Synthetic polypeptide

SEQ ID NO: 2616 - protein, 792 aa, unidentified
  REGION 1..792: note = Description of Unknown: Synthetic polypeptide
MPRILKGFLIDADFETVEGRALIRLFLRGEEGSFVVYDDSFSPYFYALPGDEPERVKERILASGAAEAIQKVEIEEKRLFGTPRVALRITVSHPQDVPRIRERIRRVEGVDLILEHDILFVRRRLIDRGIKPLTWLRLEVEERDGRALLRGVEQLEEEPPELRVAAVAIAVYNPKGAPRSSKDEIIMISVATSDGVEKVLTWREVQGLEQVEVLQDEKEMLLRFAELIKEGDYDVIVGYNTDSFDFPYIRDRLKKLGISLPLGRLDAELEVSRRGALPEARIRGRAHVDLYPIVRRHVKLNSYDLESVVEELLGIKKERLDGERLFTYWDEGGEKRALLARYALEDARVTLALAEKFLPLYCELSTIVGQSLNDVARMTSGQLVEWLLMRYATPRGELIPNHPAGEEYAARARATYAGGYVREPKRGLVEHIAVFDFRSFGPSIIVSHNIDPSTLIVGNCEENRAPELEYCFSLEREGFIPAILKELIRRRAEIKRELKRSEGDRRRTLSFAEKALKILANSFYGYMGYPRARWYRRECAESVAAFARMYIKQVMRIAEEEFKLEVVYGDTDSLFVVIPPEKRELAQKFLQKVNESMPGIIELEFEGFYRRGLFVTKKRYALLSEDGKMVVKGLEFVRRDWAPIARETQKEVLRILLEEADPEKAARLVRDVIERIRQRRVSLEDITIYTQLTKRIKSYKSLEPHVVAAQKLKERGREVAPGMIIGYIITKGTKGISQRATPVEFARLEDYDPEYYIDNQILPAIQRIFEAIGYTRDYLKEGITQTSLSRWF

SEQ ID NO: 2617 - protein, 792 aa, unidentified
  REGION 1..792: note = Description of Unknown: Synthetic polypeptide
MPRILKGFLIDADFETVEGRALIRLFLRGEEGSFVVYDDSFSPYFYALPGDEPERVKERILASGAAEAIQKVEIEEKRLFGTPRVALRITVSHPQDVPRIRERIRRVEGVDLILEHDILFVRRRLIDRGIKPLTWLRLEVEERDGRALLRGVEQLEEEPPELRVAAVAIAVYNPKGAPRSSKDEIIMISVATSDGVEKVLTWREVQGLEQVEVLQDEKEMLLRFAELIKEGDYDVIVGYNTDSFDFPYIRDRLKKLGISLPLGRLDAELEVSRRGALPEARIRGRAHVDLYPIVRRHVKLNSYDLESVVEELLGIKKEKLDGERLFTYWDRGGEKRALLARYALEDARVTLALAEKFLPLYCELSTIVGQSLNDVARMTSGQLVEWLLMRYATPRGELIPNHPAGEEYAARARATYAGGYVREPKRGLVEHIAVFDFRSFGPSIIVSHNIDPSTLIVGNCEENRAPELEYCFSLEREGFIPAILKELIRRRAEIKRELKRSEGDRRRTLSFAEKALKILANSFYGYMGYPRARWYRRECAESVAAFARMYIKQVMRIAEEEFKLEVVYGDTDSLFVVIPPEKRELAQKFLQKVNESMPGIIELEFEGFYRRGLFVTKKRYALLSEDGKMVVKGLEFVRRDWAPIARETQKEVLRILLEEADPEKAARLVRDVIERIRQRRVSLEDITIYTQLTKRIKSYKSLEPHVVAAQKLKERGREVAPGMIIGYIITKGTKGISQRATPVEFARLEDYDPEYYIDNQILPAIQRIFEAIGYTRDYLKEGITQTSLSRWF

SEQ ID NO: 2618 - protein, 767 aa, unidentified
  REGION 1..767: note = Description of Unknown: Synthetic polypeptide
MPRILKGFLIDADFETVEGRALIRLFLRGEEGSFVVYDDSFSPYFYALPGDEPERVKERILASGAAEAIQKVEIEEKRLFGTPRVALRITVSHPQDVPRIRERIRRVEGVDLILEHDILFVRRYLIDRGIKPLTWELRVAAVAIAVYNPKGAPRSSKDEIIMISVATSDGVEKVLTWREVQGLEQVEVLQDEKEMLLRFAELIKEGDYDVIVGYNTDSFDFPYIRDRLKKLGISLPLGRLDAELEVSRRGALPEARIRGRAHVDLYPIVRRHVKLNSYDLESVVEELLGIKKEKLDGERLFTYWDEGGEKRALLARYALEDARVTLALAEKFLPLYCELSTIVGQSLNDVARMTSGQLVEWLLMRYATPRGELIPNHPAGEEYAARARATYAGGYVREPKRGLVEHIAVFDFRSFGPSIIVSHNIDPSTLIVGNCEENRAPELEYCFSLEREGFIPAILKELIRRRAEIKRELKRSEGDRRRTLSFAEKALKILANSFYGYMGYPRARWYRRECAESVAAFARMYIKQVMRIAEEEFKLEVVYGDTDSLFVVIPPEKRELAQKFLQKVNESMPGIIELEFEGFYRRGLFVTKKRYALLSEDGKMVVKGLEFVRRDWAPIARETQKEVLRILLEEADPEKAARLVRDVIERIRQRRVSLEDITIYTQLTKRIKSYKSLEPHVVAAQKLKERGREVAPGMIIGYIITKGTKGISQRATPVEFARLEDYDPEYYIDNQILPAIQRIFEAIGYTRDYLKEGITQTSLSRWF

SEQ ID NO: 2619 - protein, 792 aa, unidentified
  REGION 1..792: note = Description of Unknown: Synthetic polypeptide
MPRILKGFLIDADFETVEGRALIRLFLRGEEGSFVVYDDSFSPYFYALPGDEPERVKERILASGAAEAIQKVEIEEKRLFGTPRVALRITVSHPQDVPRIRERIRRVEGVDLILEHDILFVRRRLIDRGIKPLTWLRLEVEERDGRALLRGVEQLEEEPPELRVAAVAIAVYNPKGAPRSSKDEIIMISVATSDGVEKVLTWREVQGLEQVEVLQDEKEMLLRFAELIKEGDYDVIVGYNTDSFDFPYIRDRLEKLGISLPLGRLDAELEVSRRGALPEARIRGRAHVDLYPIVRRHVKLNSYDLESVVEELLGIKKEKLDGERLFTYWDEGGEKRALLARYALEDARVTLALAEKFLPLYCELSTIVGQSLNDVARMTSGQLVEWLLMRYATPRGELIPNHPAGEEYAARARATYAGGYVREPKRGLVEHIAVFDFRSFGPSIIVSHNIDPSTLIVGNCEENRAPELEYCFSLEREGFIPAILKELIRRRAEIKRELKRSEGDRRRTLSFAEKALKILANSFYGYMGYPRARWYRRECAESVAAFARMYIKQVMRIAEEEFKLEVVYGDTDSLFVVIPPEKRELAQKFLQKVNESMPGIIELEFEGFYRRGLFVTKKRYALLSEDGKMVVKGLEFVRRDWAPIARETQKEVLRILLEEADPEKAARLVRDVIERIRQRRVSLEDITIYTQLTKRIKSYKSLEPHVVAAQKLKERGREVAPGMIIGYIITKGTKGISQRATPVEFARLEDYDPEYYIDNQILPAIQRIFEAIGYTRDYLKEGITQTSLSRWF

SEQ ID NO: 2620 - protein, 792 aa, unidentified
  REGION 1..792: note = Description of Unknown: Synthetic polypeptide
MPRILKGFLIDADFETVEGRALIRLFLRGEEGSFVVYDDSFSPYFYALPGDEPERVKERILASGAAEAIQKVEIEEKRLFGTPRVALRITVSHPQDVPRIRERIRRVEGVDLILEHDILFVRRYLIDRGIKPLTWLRLEVEERDGRALLRGVEQLEEEPPELRVAAVAIAVYNPKGAPRSSKDEIIMISVATSDGVEKVLTWREVQGLEQVEVLQDEKEMLLRFAELIKEGDYDVIVGYNTDSFDFPYIRDRLKKLGISLPLGRLDAELEVSRRGALPEARIRGRAHVDLYPIVRRHVKLNSYDLESVVEELLGIKKEKLDGERLFTYWDEGGEKRALLARYALEDARVTLALAEKFLPLYCELSTIVGQSLNDVARMTSGQLVEWLLMRYATPRGELIPNHPAGEEYAARARATYAGGYVREPKRGLVEHIAVFDFRSIGPSIIVSHNIDPSTLIVGNCEENRAPELEYCFSLEREGFIPAILKELIRRRAEIKRELKRSEGDRRRTLSFAEKRLKILANSFYGYMGYPRARWYRRECAESVAAFARMYIKQVMRIAEEEFKLEVVYGDTDSLFVVIPPEKRELAQKFLQKVNESMPGIIELEFEGFYRRGLFVTKKRYALLSEDGKMVVKGLEFVRRDWAPIARETQKEVLRILLEEADPEKAARLVRDVIERIRQRRVSLEDITIYTQLTKRIKSYKSLEPHVVAAQKLKERGREVAPGMIIGYIITKGTKGISQRATPVEFARLEDYDPEYYIDNQILPAIQRIFEAIGYTRDYLKEGITQTSLSRWF

SEQ ID NO: 2621 - protein, 792 aa, unidentified
  REGION 1..792: note = Description of Unknown: Synthetic polypeptide
MPRILKGFLIDADFETVEGRALIRLFLRGEEGSFVVYDDSFSPYFYALPGDEPERVKERILASGAAEAIQKVEIEEKRLFGTPRVALRITVSHPQDVPRIRERIRRVEGVDLILEHDILFVRRRLIDRGIKPLTWLRLEVEERDGRALLRGVEQLEEEPPELRVAAVAIAVYNPKGAPRSSKDEIIMISVATSDGVEKVLTWREVQGLEQVEVLQDEKEMLLRFAELIKEGDYDVIVGYNTDSFDFPYIRDRLKKLGISLPLGRLDAELEVSRRGALPEARIRGRAHVDLYPIVRRHVKLNSYDLESVVEELLGIKKEKLDGERLFTYWDEGGEKRALLARYALEDARVTLALAEKFLPLYCELSTIVGQSLNDVARMTSGQLVEWLLMRYATPRGELIPNHPAGEEYAARARATYAGGYVREPKRGLVEHIAVFDFRSFGPSIIVSHNIDPSTLIVGNCEENRAPELEYCFSLEREGFIPAILKELIRRRAEIKRELKRSEGDRRRTLSFAEKALKILANSFYGYMGYPRARWYRRECAESVAAFARMYIKQVMRIAEEEFKLEVVYGDTDSLFVVIPPEKRELAQKFLQKVNESMPGIIELEFEGFYRRGLFVTKKRYALISEDGKMVVKGLEFVRRDWAPIARETQKEVLRILLEEADPEKAARLVRDVIERIRQRRVSLEDITIYTQLTKRIKSYKSLEPHVVAAQKLKERGREVAPGMIIGYIITKGTKGISQRATPVEFARLEDYDPEYYIDNQILPAIQRIFEAIGYTRDYLKEGITQTSLSRWF

SEQ ID NO: 2622 - protein, 777 aa, unidentified
  REGION 1..777: note = Description of Unknown: Synthetic polypeptide
MPRILKGFLIDADFETVEGRALIRLFLRGEEGSFVVYDDSFSPYFYALPGDEPERVKERILASGAAEAIQKVEIEEKRLFGTPRVALRITVSHPQDVPRIRERIRRVEGVDLILEHDILFVRRYLIDRGIKPLTWLREQLEEEPPELRVAAVAIAVYNPKGAPRSSKDEIIMISVATSDGVEKVLTWREVQGLEQVEVLQDEKEMLLRFAELIKEGDYDVIVGYNTDSFDFPYIRDRLKKLGISLPLGRLDAELEVSRRGALPEARIRGRAHVDLYPIVRRHVKLNSYDLESVVEELLGIKKEKLDGERLFTYWDEGGEKRALLARYALEDARVTLALAEKFLPLYCELSTIVGQSLNDVARMTSGQLVEWLLMRYATPRGELIPNHPAGEEYAARARATYAGGYVREPKRGLVEHIAVFDFRSFGPSIIVSHNIDPSTLIVGNCEENRAPELEYCFSLEREGFIPAILKELIRRRAEIKRELKRSEGDRRRTLSFAEKALKILANSFYGYMGYPRARWYRRECAESVAAFARMYIKQVMRIAEEEFKLEVVYGDTDSLFVVIPPEKRELAQKFLQKVNESMPGIIELEFEGFYRRGLFVTKKRYALLSEDGKMVVKGLEFVRRDWAPIARETQKEVLRILLEEADPEKAARLVRDVIERIRQRRVSLEDITIYTQLTKRIKSYKSLEPHVVAAQKLKERGREVAPGMIIGYIITKGTKGISQRATPVEFARLEDYDPEYYIDNQILPAIQRIFEAIGYTRDYLKEGITQTSLSRWF

SEQ ID NO: 2623 - protein, 792 aa, unidentified
  REGION 1..792: note = Description of Unknown: Synthetic polypeptide
MPRILKGFLIDADFETVEGRALIRLFLRGEEGSFVVYDDSFSPYFYALPGDEPERVKERILASGAAEAIQKVEIEEKRLFGTPRVALRITVSHPQDVPRIRERIRRVEGVDLILEHDILFVRRRLIDRGIKPLTWLRLEVEERDGRALLRGVEQLEEEPPELRVAAVAIAVYNPKGAPRSSKDEIIMISVATSDGVEKVLTWREVQGLEQVEVLQDEKEMLLRFAELIKEGDYDVIVGYNTDSFDFPYIRDRLKKLGISLPLGRLDAELEVSRRGALPEARIRGRAHFDLYPIVRRHVKLNSYDLESVVEELLGIKKEKLDGERLFTYWDEGGEKRALLARYALEDARVTLALAEKFLPLYCELSTIVGQSLNDVARMTSGQLVEWLLMRYATPRGELIPNHPAGEEYAARARATYAGGYVREPKRGLVEHIAVFDFRSFGPSIIVSHNIDPSTLIVGNCEENRAPELEYCFSLEREGFIPAILKELIRRRAEIKRELKRSEGDRRRTLSFAEKALKILANSFYGYMGYPRARWYRRECAESVAAFARMYIKQVMRIAEEEFKLEVVYGDTDSLFVVIPPEKRELAQKFLQKVNESMPGIIELEFEGFYRRGLFVTKKRYALLSEDGKMVVKGLEFVRRDWAPIARETQKEVLRILLEEADPEKAARLVRDVIERIRQRRVSLEDITIYTQLTKRIKSYKSLEPHVVAAQKLKERGREVAPGMIIGYIITKGTKGISQRATPVEFARLEDYDPEYYIDNQILPAIQRIFEAIGYTRDYLKEGITQTSLSRWF

SEQ ID NO: 2624 - protein, 792 aa, unidentified
  REGION 1..792: note = Description of Unknown: Synthetic polypeptide
VPRILKGFLIDADFETVEGRALIRLFLRGEEGSFVVYDDSFSPYFYALPGDEPERVKERILASGAAEAIQKVEIEEKRLFGTPRVALRITVSHPQDVPRIRERIRRVEGVDLILEHDILFVRRRLIDRGIKPLTWLRLEVEERDGRALLRGVEQLEEEPPELRVAAVAIAVYNPKGAPRSSKDEIIMISVATSDGVEKVLTWREVQGLEQVEVLQDEKEMLLRFAELIKEGDYDVIVGYNTDSFDFPYIRDRLKKLGISLPLGRLDAELEVSRRGALPEARIRGRAHVDLYPIVRRHVKLNSYDLESVVEELLGIKKEKLDGERLFTYWDEGGEKRALLARYALEDARVTLALAEKFLPLYCELSTIVGQSLNDVARMTSGQLVEWLLMRYATPRGELIPNHPAGEEYAARARATYAGGYVREPKRGLVEHIAVFDFRSFGPSIIVSHNIDPSTLIVGNCEENRAPELEYCFSLEREGFIPAILKELIRRRAEIKRELKRSEGDRRRTLSFAEKALKILANSFYGYMGYPRARWYRRECAESVAAFARMYIKQVMRIAEEEFKLEVVYGDTDSLFVVIPPEKRELAQKFLQKVNESMPGIIELEFEGFYRRGLFVTKKRYALLSEDGKMVVKGLEFVRRDWAPIARETQKEVLRILLEEADPEKAARLVRDVIERIRQRRVSLEDITIYTQLTKRIKSYKSLEPHVVAAQKLKERGREVAPGMIIGYIITKGTKGISQRATPVEFARLEDYDPEYYIDNQILPAIQRIFEAIGYTRDYLKEGITQTSLSRWF

SEQ ID NO: 2625 - protein, 792 aa, unidentified
  REGION 1..792: note = Description of Unknown: Synthetic polypeptide
MPRILKGFLIDADFETVEGRALIRLFLRGEEGSFVVYDDSFSPYFYALPGDEPERVKERILASGAAEAIQKVEIEEKRLFGTPRVALRITVSHPQDVPRIRERIRRVEGVDLILEHDILFVRRRLIDRGIKPLTWLRLEVEERDGRALLRGVEQLEEEPPELRVAAVAIAVYNPKGAPRSSKDEIIMISVATSDGVEKVLTWREVQGLEQVEVLQDEKEMLLRFAELIKEGDYDVIVGYNTDSFDFPYIRDSLKKLGISLPLGRLDAELEVSRRGALPEARIRGRAHVDLYPIVRRHVKLNSYDLESVVEELLGIKKEKLDGERLFTYWDEGGEKRALLARYALEDARVTLALAEKFLPLYCELSTIVGQSLNDVARMTSGQLVEWLLMRYATPRGELIPNHPAGEEYAARARATYAGGYVREPKRGLVEHIAVFDFRSFGPSIIVSHNIDPSTLIVGNCEENRAPELEYCFSLEREGFIPAILKELIRRRAEIKRELKRSEGDRRRTLSFAEKALKILANSFYGYMGYPRARWYRRECAESVAAFARMYIKQVMRIAEEEFKLEVVYGDTDSLFVVIPPEKRELAQKFLQKVNESMPGIIELEFEGFYRRGLFVTKKRYALLSEDGKMVVKGLEFVRRDWAPIARETQKEVLRILLEEADPEKAARLVRDVIERIRQRRVSLEDITIYTQLTKRIKSYKSLEPHVVAAQKLKERGREVAPGMIIGYIITKGTKGISQRATPVEFARLEDYDPEYYIDNQILPAIQRIFEAIGYTRDYLKEGITQTSLSRWF

SEQ ID NO: 2626 - protein, 792 aa, unidentified
  REGION 1..792: note = Description of Unknown: Synthetic polypeptide
MPRILKGFLIDADFETVEGRALIRLFLRGEEGSFVVYDDSFSPYFYALPGDEPERVKERILASGAAEAIQKVEIEEKRLFGTPRVALRITVSHPQDVPRIRERIRRVEGVDLILEHDILFVRRRLIDRGIKPLTWLRLEVEERDGRALLRGVEQLEEEPPELRVAAVAIAVYNPKGAPRSSKDEIIMISVATSDGVEKVLTWREVQGLEQVEVLQDEKEMLLRFAELIKEGDYDVIVTYNTDSFDFPYIRDRLKKLGISLPLGRLDAELEVSRRGALPEARIRGRAHVDLYPIVRRHVKLNSYDLESVVEELLGIKKEKLDGERLFTYWDEGGEKRALLARYALEDARVTLALAEKFLPLYCELSTIVGQSLNDVARMTSGQLVEWLLMRYATPRGELIPNHPAGEEYAARARATYAGGYVREPKRGLVEHIAVFDFRSFGPSIIVSHNIDPSTLIVGNCEENRAPELEYCFSLEREGFIPAILKELIRRRAEIKRELKRSEGDRRRTLSFAEKALKILANSFYGYMGYPRARWYRRECAESVAAFARMYIKQVMRIAEEEFKLEVVYGDTDSLFVVIPPEKRELAQKFLQKVNESMPGIIELEFEGFYRRGLFVTKKRYALLSEDGKMVVKGLEFVRRDWAPIARETQKEVLRILLEEADPEKAARLVRDVIERIRQRRVSLEDITIYTQLTKRIKSYKSLEPHVVAAQKLKERGREVAPGMIIGYIITKGTKGISQRATPVEFARLEDYDPEYYIDNQILPAIQRIFEAIGYTRDYLKEGITQTSLSRWF

SEQ ID NO: 2627 - protein, 792 aa, unidentified
  REGION 1..792: note = Description of Unknown: Synthetic polypeptide
MPRILKGFLIDADFETVEGRALIRLFLRGEEGSFVVYDDSFSPYFYALPGDEPERVKERILASGAAEAIQKVEIEEKRLFGTPRVALRITVSHPQDVPRIRERIRRVEGVDLILEHDILFVRRRLIDRGIKPLTWLRLEVEERDGRALLRGVEQLEEEPPELRVAAVAIAVYNPKGAPRSSKDEIIMISVATSDGVEKVLTWREVQGLEQVEVLQDEKEMLLRFAELIKEGDYDVIVGYNTDSFDFPYIRDRLKKLGISLPLGRLDAELEVSRRGALPEARVRGRAHVDLYPIVRRHVKLNSYDLESVVEELLGIKKEKLDGERLFTYWDEGGEKRALLARYALEDARVTLALAEKFLPLYCELSTIVGQSLNDVARMTSGQLVEWLLMRYATPRGELIPNHPAGEEYAARARATYAGGYVREPKRGLVEHIAVFDFRSFGPSIIVSHNIDPSTLIVGNCEENRAPELEYCFSLEREGFIPAILKELIRRRAEIKRELKRSEGDRRRTLSFAEKALKILANSFYGYMGYPRARWYRRECAESVAAFARMYIKQVMRIAEEEFKLEVVYGDTDSLFVVIPPEKRELAQKFLQKVNESMPGIIELEFEGFYRRGLFVTKKRYALLSEDGKMVVKGLEFVRRDWAPIARETQKEVLRILLEEADPEKAARLVRDVIERIRQRRVSLEDITIYTQLTKRIKSYKSLEPHVVAAQKLKERGREVAPGMIIGYIITKGTKGISQRATPVEFARLEDYDPEYYIDNQILPAIQRIFEAIGYTRDYLKEGITQTSLSRWF

SEQ ID NO: 2628 - protein, 792 aa, unidentified
  REGION 1..792: note = Description of Unknown: Synthetic polypeptide
MPRILKGFLIDADFETVEGRALIRLFLRGEEGSFVVYDDSFSPYFYALPGDEPERVKERILASGAAEAIQKVEIEEKRLFGTPRVALRITVSHPQDVPRIRERIRRVEGVDLILEHDILFVRRRLIDRGIKPLTWLRLEVEERDGRALLRGVEQLEEEPPELRVAAVAIAVYNPKGAPRSSKDEIIMISVATSDGVEKVLTWREVQGLEQVEVLQDEKEMLLRFAELIKEGDYDVIVGYNTDSFDFPYIRDRLKKLGISLPLGRLDAELEVSRRGALPEARIRGRAHVDLYPIVRRHVKLNSYDLESVVEELLGIKKEKLDGERLFTYWDEGGEKRALLARYALEDARVTLALAEKFLPLYCELSTIVGQSLNDVARMTSGQLVEWLLMRYATPRGELIPNHPAGEEYAARARATYAGGYVREPKRGLVEHIAVFDFRSFGPSIIVSHNIDPSTLIVGNCEENRAPELEYCFSLEREGFIPAILKELIRRRAEIKRELKRSEGDRRRTLSFAEKALKILANSFYGYMGYPRARWYRRECAESVAAFARMYIKQVMRIAEEEFKLEVVYGDTDSLFVVIPPEKRELAQKFLQKVNESMPGIIELEFEGFYRRGLFVTKKRYALLSEDGKIVVKGLEFVRRDWAPIARETQKEVLRILLEEADPEKAARLVRDVIERIRQRRVSLEDITIYTQLTKRIKSYKSLEPHVVAAQKLKERGREVAPGMIIGYIITKGTKGISQRATPVEFARLEDYDPEYYIDNQILPAIQRIFEAIGYTRDYLKEGITQTSLSRWF

SEQ ID NO: 2629 - protein, 792 aa, unidentified
  REGION 1..792: note = Description of Unknown: Synthetic polypeptide
MPRILKGFLIDADNETVEGRALIRLFLRGEEGSFVVYDDSFSPYFYALPGDEPERVKERILASGAAEAIQKVEIEEKRLFGTPRVALRITVSHPQDVPRIRERIRRVEGVDLILEHDILFVRRRLIDRGIKPLTWLRLEVEERDGRALLRGVEQLEEEPPELRVAAVAIAVYNPKGAPRSSKDEIIMISVATSDGVEKVLTWREVQGLEQVEVLQDEKEMLLRFAELIKEGDYDVIVGYNTDSFDFPYIRDRLKKLGISLPLGRLDAELEVSRRGALPEARIRGRAHVDLYPIVRRHVKLNSYDLESVVEELLGIKKEKLDGERLFTYWDEGGEKRALLARYALEDARVTLALAEKFLPLYCELSTIVGQSLNDVARMTSGQLVEWLLMRYATPRGELIPNHPAGEEYAARARATYAGGYVREPKRGLVEHIAVFDFRSFGPSIIVSHNIDPSTLIVGNCEENRAPELEYCFSLEREGFIPAILKELIRRRAEIKRELKRSEGDRRRTLSFAEKALKILANSFYGYMGYPRARWYRRECAESVAAFARMYIKQVMRIAEEEFKLEVVYGDTDSLFVVIPPEKRELAQKFLQKVNESMPGIIELEFEGFYRRGLFVTKKRYALLSEDGKMVVKGLEFVRRDWAPIARETQKEVLRILLEEADPEKAARLVRDVIERIRQRRVSLEDITIYTQLTKRIKSYKSLEPHVVAAQKLKERGREVAPGMIIGYIITKGTKGISQRATPVEFARLEDYDPEYYIDNQILPAIQRIFEAIGYTRDYLKEGITQTSLSRWF

SEQ ID NO: 2630 - protein, 792 aa, unidentified
  REGION 1..792: note = Description of Unknown: Synthetic polypeptide
MPRILKGFLIDADFETVEGRALIRLFLRGEEGSFVVYDDSFSPYFYALPGDEPERVKERILASGAAVAIQKVEIEEKRLFGTPRVALRITVSHPQDVPRIRERIRRVEGVDLILEHDILFVRRRLIDRGIKPLTWLRLEVEERDGRALLRGVEQLEEEPPELRVAAVAIAVYNPKGAPRSSKDEIIMISVATSDGVEKVLTWREVQGLEQVEVLQDEKEMLLRFAELIKEGDYDVIVGYNTDSFDFPYIRDRLKKLGISLPLGRLDAELEVSRRGALPEARIRGRAHVDLYPIVRRHVKLNSYDLESVVEELLGIKKEKLDGERLFTYWDEGGEKRALLARYALEDARVTLALAEKFLPLYCELSTIVGQSLNDVARMTSGQLVEWLLMRYATPRGELIPNHPAGEEYAARARATYAGGYVREPKRGLVEHIAVFDFRSFGPSIIVSHNIDPSTLIVGNCEENRAPELEYCFSLEREGFIPAILKELIRRRAEIKRELKRSEGDRRRTLSFAEKALKILANSFYGYMGYPRARWYRRECAESVAAFARMYIKQVMRIAEEEFKLEVVYGDTDSLFVVIPPEKRELAQKFLQKVNESMPGIIELEFEGFYRRGLFVTKKRYALLSEDGKMVVKGLEFVRRDWAPIARETQKEVLRILLEEADPEKAARLVRDVIERIRQRRVSLEDITIYTQLTKRIKSYKSLEPHVVAAQKLKERGREVAPGMIIGYIITKGTKGISQRATPVEFARLEDYDPEYYIDNQILPAIQRIFEAIGYTRDYLKEGITQTSLSRWF

SEQ ID NO: 2631 - protein, 792 aa, unidentified
  REGION 1..792: note = Description of Unknown: Synthetic polypeptide
MPRILKGFLIDADFETVEGRALIRLFLRGEEGSFVVYDDSFSPYFYADPGDEPERVKERILASGAAEAIQKVEIEEKRLFGTPRVALRITVSHPQDVPRIRERIRRVEGVDLILEHDILFVRRRLIDRGIKPLTWLRLEVEERDGRALLRGVEQLEEEPPELRVAAVAIAVYNPKGAPRSSKDEIIMISVATSDGVEKVLTWREVQGLEQVEVLQDEKEMLLRFAELIKEGDYDVIVGYNTDSFDFPYIRDRLKKLGISLPLGRLDAELEVSRRGALPEARIRGRAHVDLYPIVRRHVKLNSYDLESVVEELLGIKKEKLDGERLFTYWDEGGEKRALLARYALEDARVTLALAEKFLPLYCELSTIVGQSLNDVARMTSGQLVEWLLMRYATPRGELIPNHPAGEEYAARARATYAGGYVREPKRGLVEHIAVFDFRSFGPSIIVSHNIDPSTLIVGNCEENRAPELEYCFSLEREGFIPAILKELIRRRAEIKRELKRSEGDRRRTLSFAEKALKILANSFYGYMGYPRARWYRRECAESVAAFARMYIKQVMRIAEEEFKLEVVYGDTDSLFVVIPPEKRELAQKFLQKVNESMPGIIELEFEGFYRRGLFVTKKRYALLSEDGKMVVKGLEFVRRDWAPIARETQKEVLRILLEEADPEKAARLVRDVIERIRQRRVSLEDITIYTQLTKRIKSYKSLEPHVVAAQKLKERGREVAPGMIIGYIITKGTKGISQRATPVEFARLEDYDPEYYIDNQILPAIQRIFEAIGYTRDYLKEGITQTSLSRWF

SEQ ID NO: 2632 - protein, 792 aa, unidentified
  REGION 1..792: note = Description of Unknown: Synthetic polypeptide
MPRILKGFLIDADFETVEGRALIRLFLRGEEGSFVVYDDSFSPYFYALPGDEPERVKERILASGAAEAIQKVEIEEKRLFGTPRVALRITVSHPQDVPRIRERIRRVEGVDLILEHDILFVRRRLIDRGIKPLTWLRLEVEERDGRALLRGVEQLEEEPPELRVAAVAIAVYNPKGAPRSSKDEIIMISVATSDGVEKVLTWREVQGLEQVEVLQDEKEMLLRFAELIKEGDYDVIVGYNTDSFDFPYIRDRLKKLGISLPLGRLDAELEVSRRGALPEARIRGRAHVDLYPIVRRHIKLNSYDLESVVEELLGIKKEKLDGERLFTYWDEGGEKRALLARYALEDARVTLALAEKFLPLYCELSTIVGQSLNDVARMTSGQLVEWLLMRYATPRGELIPNHPAGEEYAARARATYAGGYVREPKRGLVEHIAVFDFRSFGPSIIVSHNIDPSTLIVGNCEENRAPELEYCFSLEREGFIPAILKELIRRRAEIKRELKRSEGDRRRTLSFAEKALKILANSFYGYMGYPRARWYRRECAESVAAFARMYIKQVMRIAEEEFKLEVVYGDTDSLFVVIPPEKRELAQKFLQKVNESMPGIIELEFEGFYRRGLFVTKKRYALLSEDGKMVVKGLEFVRRDWAPIARETQKEVLRILLEEADPEKAARLVRDVIERIRQRRVSLEDITIYTQLTKRIKSYKSLEPHVVAAQKLKERGREVAPGMIIGYIITKGTKGISQRATPVEFARLEDYDPEYYIDNQILPAIQRIFEAIGYTRDYLKEGITQTSLSRWF

SEQ ID NO: 2633 - protein, 792 aa, unidentified
  REGION 1..792: note = Description of Unknown: Synthetic polypeptide
MPRILKGFLIDADFETVEGRALIRLFLRGEEGSFVVYDDSFSPYFYALPGDEPERVKERILASGAAEAIQKVEIEEKRLFGTPRVALRITVSHPQDVPRIRERIRRVEGVDLILEHDILFVRRRLIDRGIKPLTWLRLEVEERDGRALLRGVEQLEEEPPELRVAAVAIAVYNPKGAPRSSKDEIIMISVATSDGVEKVLTWREVQGLEQVEVLQDEKEMLLRFAELIKEGDYDVIVGYNTDSFDFPYIRDRLKKLGISLPLGRLDAELEVSRRGALPEARIRGRAHVDLYPIVRRHVKLNSYDLESVVEEILGIKKEKLDGERLFTYWDEGGEKRALLARYALEDARVTLALAEKFLPLYCELSTIVGQSLNDVARMTSGQLVEWLLMRYATPRGELIPNHPAGEEYAARARATYAGGYVREPKRGLVEHIAVFDFRSFGPSIIVSHNIDPSTLIVGNCEENRAPELEYCFSLEREGFIPAILKELIRRRAEIKRELKRSEGDRRRTLSFAEKALKILANSFYGYMGYPRARWYRRECAESVAAFARMYIKQVMRIAEEEFKLEVVYGDTDSLFVVIPPEKRELAQKFLQKVNESMPGIIELEFEGFYRRGLFVTKKRYALLSEDGKMVVKGLEFVRRDWAPIARETQKEVLRILLEEADPEKAARLVRDVIERIRQRRVSLEDITIYTQLTKRIKSYKSLEPHVVAAQKLKERGREVAPGMIIGYIITKGTKGISQRATPVEFARLEDYDPEYYIDNQILPAIQRIFEAIGYTRDYLKEGITQTSLSRWF

SEQ ID NO: 2634 - protein, 792 aa, unidentified
  REGION 1..792: note = Description of Unknown: Synthetic polypeptide
MPRILKGFLIDADFETVEGRALIRLFLRGEEGSFVVYDDSFSPYFYALPGDEPERVKERILASGAAEAIQKVEIEEKRLFGTPRVALRITVSHPQDVPRIRERIRRVEGVDLILEHDILFVRRYLIDRGIKPLTWLRLEVEERDGRALLRGVEQLEEEPPELRVAAVAIAVYNPKGAPRSSKDEIIMISVATSDGVEKVLTWREVQGLEQVEVLQDEKEMLLRFAELIKEGDYDVIVGYNTDSFDFPYIRDRLKKLGISLPLGRLDAELEVSRRGALPEARIRGRAHVDLYPIVRRHVKLNSYDLESVVEELLGIKKEKLDGERLFTYWDEGGEKRALLARYALEDARVTLALAEKFLPLYCELSTIVGQSLNDVARMTSGQLVEWLLMRYATPRGELIPNHPAGEEYAARARATYAGGYVREPKRGLVEHIAVFDFRSFGPSIIVSHNIDPSTLIVGNCEENRAPELEYCFSLEREGFIPAILKELIRRRAEIKRELKRSEGDRRRTLSFAEKALKILANSFYGYMGYPRARWYRRECAESVAAFARMYIKQVMRIAEEEFKLEVVYGDTDSLFVVIPPEKRELAQKFLQKVNESMPGIIELEFEGFYRRGLFVTKKRYALLSEDGKMVVKGLEFVRRDWAPIARETQKEVLRILLEEADPEGAARLVRDVIERIRQRRVSLEDITIYTQLTKRIKSYKSLEPHVVAAQKLKERGREVAPGMIIGYIITKGTKGISQRATPVEFARLEDYDPEYYIDNQILPAIQRIFEAIGYTRDYLKEGITQTSLSRWF

SEQ ID NO: 2635 - protein, 792 aa, unidentified
  REGION 1..792: note = Description of Unknown: Synthetic polypeptide
MPRILKGFLIDADFETVEGRALIRLFLRGEEGSFVVYDDSFSPYFYALPGDEPERVKERILASGAAEAIQKVEIEEKRLFGTPRVALRITVSHPQDVPRIRERIRRVEGVDLILEHDILFVRRRLIDRGIKPLTWLRLEVEERDGRALLRGVEQLEEEPPELRVAAVAIAVYNPKGAPRSSKDNIIMISVATSDGVEKVLTWREVQGLEQVEVLQDEKEMLLRFAELIKEGDYDVIVGYNTDSFDFPYIRDRLKKLGISLPLGRLDAELEVSRRGALPEARIRGRAHVDLYPIVRRHVKLNSYDLESVVEELLGIKKEKLDGERLFTYWDEGGEKRALLARYALEDARVTLALAEKFLPLYCELSTIVGQSLNDVARMTSGQLVEWLLMRYATPRGELIPNHPAGEEYAARARATYAGGYVREPKRGLVEHIAVFDFRSFGPSIIVSHNIDPSTLIVGNCEENRAPELEYCFSLEREGFIPAILKELIRRRAEIKRELKRSEGDRRRTLSFAEKALKILANSFYGYMGYPRARWYRRECAESVAAFARMYIKQVMRIAEEEFKLEVVYGDTDSLFVVIPPEKRELAQKFLQKVNESMPGIIELEFEGFYRRGLFVTKKRYALLSEDGKMVVKGLEFVRRDWAPIARETQKEVLRILLEEADPEKAARLVRDVIERIRQRRVSLEDITIYTQLTKRIKSYKSLEPHVVAAQKLKERGREVAPGMIIGYIITKGTKGISQRATPVEFARLEDYDPEYYIDNQILPAIQRIFEAIGYTRDYLKEGITQTSLSRWF

SEQ ID NO: 2636 - protein, 792 aa, unidentified
  REGION 1..792: note = Description of Unknown: Synthetic polypeptide
MPRILKGFLIDADFETVEGRALIRLFLRGEEGSFVVYDDSFSPYFYALPGDEPERVKERILASGAAEAIQKVEIEEKRLFGTPRVALRITVSHPQDVPRIRERIRRVEGVDLILEHDILFVRRYLIDRGIKPLTWLRLEVEERDGRALLRGVEQLEEEPPELRVAAVAIAVYNPKGAPRSSKDEIIMISVATSDGVEKVLTWREVQGLEQVEVLQDEKEMLLRFAELIKEGDYDVIVGYNTDSFDFPYIRDRLKKLGISLPLGRLDAELEVSRRGALPEARIRGRAHVDLYPIVRRHVKLNSYDLESVVEELLGIKKEKLDGERLFTYWDEGGEKRALLARYALEDARVTLALAEKFLPLYCELSTIVGQSLNDVARMTSGQLVEWLLMRYATPRGELIPNHPAGEEYAARARATYAGGYVREPKRGLVEHIAVFDFRSFGPSIIVSHNIDPSTLIVGNCEENRAPELEYCFSLEREGFIPAILKELIRRRAEIKRELKRSEGDRRRTLSFAEKALKILANSFYGYMGYPRARWYRRECAESVAAFARMYIKQVMRIAEEEFKLEVVYGDTDSLFVVIPPEKRELAQKFLQKVNESMPGIIELEFEGFYRRGLFVTKKRYALLSEDGKMVVKGLEFVRRDWAPIARETQKEVLRILLEEADPERAARLVRDVIERIRQRRVSLEDITIYTQLTKRIKSYKSLEPHVVAAQKLKERGREVAPGMIIGYIITKGTKGISQRATPVEFARLEDYDPEYYIDNQILPAIQRIFEAIGYTRDYLKEGITQTSLSRWF

SEQ ID NO: 2637 - protein, 774 aa, unidentified
  REGION 1..774: note = Description of Unknown: Synthetic polypeptide
MPRILKGFLIDADFETVEGRALIRLFLRGEEGSFVVYDDSFSPYFYALPGDEPERVKERILASGAAEAIQKVEIEEKRLFGTPRVALRITVSHPQDVPRIRERIRRVEGVDLILEHDILFVRRYLIDRGIKPLTWLRLEVEEELRVAAVAIAVYNPKGAPRSSKDEIIMISVATSDGVEKVLTWREVQGLEQVEVLQDEKEMLLRFAELIKEGDYDVIVGYNTDSFDFPYIRDRLKKLGISLPLGRLDAELEVSRRGALPEARIRGRAHVDLYPIVRRHVKLNSYDLESVVEELLGIKKEKLDGERLFTYWDEGGEKRALLARYALEDARVTLALAEKFLPLYCELSTIVGQSLNDVARMTSGQLVEWLLMRYATPRGELIPNHPAGEEYAARARATYAGGYVREPKRGLVEHIAVFDFRSFGPSIIVSHNIDPSTLIVGNCEENRAPELEYCFSLEREGFIPAILKELIRRRAEIKRELKRSEGDRRRTLSFAEKALKILANSFYGYMGYPRARWYRRECAESVAAFARMYIKQVMRIAEEEFKLEVVYGDTDSLFVVIPPEKRELAQKFLQKVNESMPGIIELEFEGFYRRGLFVTKKRYALLSEDGKMVVKGLEFVRRDWAPIARETQKEVLRILLEEADPEKAARLVRDVIERIRQRRVSLEDITIYTQLTKRIKSYKSLEPHVVAAQKLKERGREVAPGMIIGYIITKGTKGISQRATPVEFARLEDYDPEYYIDNQILPAIQRIFEAIGYTRDYLKEGITQTSLSRWF

SEQ ID NO: 2638 - protein, 792 aa, unidentified
  REGION 1..792: note = Description of Unknown: Synthetic polypeptide
MPRILKGFLIDADFETVEGRALIRLFLRGEEGSFVVYDDSFSPYFYALPGDEPERVKERILASGAAEAIQKVEIEEKRLFGTPRVALRITVSHPQDVPRIRERIRRVEGVDLILEHDILFVRRRLIDRGIKPLTWLRLEVEERDGRALLRGVEQLEEEPPELRLAAVAIAVYNPKGAPRSSKDEIIMISVATSDGVEKVLTWREVQGLEQVEVLQDEKEMLLRFAELIKEGDYDVIVGYNTDSFDFPYIRDRLKKLGISLPLGRLDAELEVSRRGALPEARIRGRAHVDLYPIVRRHVKLNSYDLESVVEELLGIKKEKLDGERLFTYWDEGGEKRALLARYALEDARVTLALAEKFLPLYCELSTIVGQSLNDVARMTSGQLVEWLLMRYATPRGELIPNHPAGEEYAARARATYAGGYVREPKRGLVEHIAVFDFRSFGPSIIVSHNIDPSTLIVGNCEENRAPELEYCFSLEREGFIPAILKELIRRRAEIKRELKRSEGDRRRTLSFAEKALKILANSFYGYMGYPRARWYRRECAESVAAFARMYIKQVMRIAEEEFKLEVVYGDTDSLFVVIPPEKRELAQKFLQKVNESMPGIIELEFEGFYRRGLFVTKKRYALLSEDGKMVVKGLEFVRRDWAPIARETQKEVLRILLEEADPEKAARLVRDVIERIRQRRVSLEDITIYTQLTKRIKSYKSLEPHVVAAQKLKERGREVAPGMIIGYIITKGTKGISQRATPVEFARLEDYDPEYYIDNQILPAIQRIFEAIGYTRDYLKEGITQTSLSRWF

SEQ ID NO: 2639 - protein, 792 aa, unidentified
  REGION 1..792: note = Description of Unknown: Synthetic polypeptide
MPRILKGFLIDADFETVEGRALIRLFLRGEEGSFVVYDDSFSPYFYALPGDEPERVKERILASGAAEAIQKVEIEEKRLFGTPRVALRITVSHPQDVPRIRERIRRVEGVDLILEHDILFVRRRLIDRGIKPLTWLRLEVEERDGRALLRGVEQLEEEPPELRVAAVAIAVYNPKGAPRSSKDEIIMISVATSDGVEKVLTWREVQGLEQVEVLQDEKEMLLRFAELIKEGDYDVIVGYNTDSFDFPYIRDRLKKLGISLPLGRLDAELEVSRRGALPEARIRGRAHVDLYPIVRRHVKLNSYDLESVVEELLGIKKEKLDGERLFTYWDEGGEKRALLARYALEDARVTLALAEKFLPLYCELSTIVGQSLNDVARMTSGQLVEWLLMRYATPRGELIPNHPAGEEYAARARATYAGGYVREPKRGLVEHIAVFDFRSFGPSIIVSHNIDPSTLIVGNCEENRAPELEYCFSLEREGFIPAILKELIRRRAEIKRELKRSEGDRRRTLSFAEKALKILANSFYGYMGYPRARWYRRECAESVAAFARMYIKQVMRIAEEEFKLEVVYGDTDSLFVVIPPEKRELAQKFLQKVNESMPGIIELEFEGFYRRGLFVTKKRYALLSEDGKMVVKGLEFVRRDWAPIARETQKEVLRILLEEADPEKAARLVRDVIERIRQRRVSLEDITIYTQLTKRIKSYKSLEPHVVAAQKLKERGREIAPGMIIGYIITKGTKGISQRATPVEFARLEDYDPEYYIDNQILPAIQRIFEAIGYTRDYLKEGITQTSLSRWF

SEQ ID NO: 2640 - protein, 792 aa, unidentified
  REGION 1..792: note = Description of Unknown: Synthetic polypeptide
MPRILKGFLIDADFETVEGRALIRLFLRGEEGSFVVYDDSFSPYFYALPGDEPERVKERILASGAAEAIQKVEIEEKRLFGTPRVALRITVSHPQDVPRIRERIRRVEGVDLILEHDILFVRRRLIDRGIKPLTWLRLEVEERDGRALLRGVEQLEEEPPELRIAAVAIAVYNPKGAPRSSKDEIIMISVATSDGVEKVLTWREVQGLEQVEVLQDEKEMLLRFAELIKEGDYDVIVGYNTDSFDFPYIRDRLKKLGISLPLGRLDAELEVSRRGALPEARIRGRAHVDLYPIVRRHVKLNSYDLESVVEELLGIKKEKLDGERLFTYWDEGGEKRALLARYALEDARVTLALAEKFLPLYCELSTIVGQSLNDVARMTSGQLVEWLLMRYATPRGELIPNHPAGEEYAARARATYAGGYVREPKRGLVEHIAVFDFRSFGPSIIVSHNIDPSTLIVGNCEENRAPELEYCFSLEREGFIPAILKELIRRRAEIKRELKRSEGDRRRTLSFAEKALKILANSFYGYMGYPRARWYRRECAESVAAFARMYIKQVMRIAEEEFKLEVVYGDTDSLFVVIPPEKRELAQKFLQKVNESMPGIIELEFEGFYRRGLFVTKKRYALLSEDGKMVVKGLEFVRRDWAPIARETQKEVLRILLEEADPEKAARLVRDVIERIRQRRVSLEDITIYTQLTKRIKSYKSLEPHVVAAQKLKERGREVAPGMIIGYIITKGTKGISQRATPVEFARLEDYDPEYYIDNQILPAIQRIFEAIGYTRDYLKEGITQTSLSRWF

SEQ ID NO: 2641 - protein, 792 aa, unidentified
  REGION 1..792: note = Description of Unknown: Synthetic polypeptide
MPRILKGFLIDADFETVEGRALIRLFLRGEEGSFVVYDDSFSPYFYALPGDEPERVKERILASGAAEAIQKVEIEEKRLFGTPRVALRITVSHPQDVPRIRERIRRVEGVDLILEHDILFVRRRLIDRGIKPLTWLRLEVEERDGRALLRGVEQLEEEPPELRVAAVAIAVYNPKGAPRSSKDEIIMISVATSDGVEKVLTWREVQGLEQVEVLQDEKEMLLRFAELIKEGDYDVIVGYNTDSFDFPYIRDRLKKLGISLPLGRLDAELEVSRRGALPEARIRGRAHVDLYPIVRRHVKLNSYDLESVVEELLGIKKEKLDGERLFTYWDEGGEKRALLARYALEDARVTLALAEKFLPLYCELSTIVGQSLNDVARMTSGQLVEWLLLRYATPRGELIPNHPAGEEYAARARATYAGGYVREPKRGLVEHIAVFDFRSFGPSIIVSHNIDPSTLIVGNCEENRAPELEYCFSLEREGFIPAILKELIRRRAEIKRELKRSEGDRRRTLSFAEKALKILANSFYGYMGYPRARWYRRECAESVAAFARMYIKQVMRIAEEEFKLEVVYGDTDSLFVVIPPEKRELAQKFLQKVNESMPGIIELEFEGFYRRGLFVTKKRYALLSEDGKMVVKGLEFVRRDWAPIARETQKEVLRILLEEADPEKAARLVRDVIERIRQRRVSLEDITIYTQLTKRIKSYKSLEPHVVAAQKLKERGREVAPGMIIGYIITKGTKGISQRATPVEFARLEDYDPEYYIDNQILPAIQRIFEAIGYTRDYLKEGITQTSLSRWF

SEQ ID NO: 2642 - protein, 792 aa, unidentified
  REGION 1..792: note = Description of Unknown: Synthetic polypeptide
MPRILKGFLIDADFETVEGRALIRLFLRGEEGSFVVYDDSFSPYFYALPGDEPERVKERILASGAAEAIQKVEIEEKRLFGTPRVALRITVSHPQDVPRIRERIRRVEGVDLILEHDILFVRRRLIDRGIKPLTWLRLEVEERDGRALLRGVEQLEEEPPELRVAAVAIAVYNPKGAPRSSKDEIIMISVATSDGVEKVLTWREVQGLEQVEVLQDEKEMLLRFAELIKEGDYDVIVGYNTDSFDFPYIRDRLKKLGISLPLGRLDAELEVSRRGALPEARIRGRAHVDLYPIVRRHVKLNSYDLESVVEELLGIKKEKLDGERLFTYWDEGGEKRALLARYALEDARVTLALAEKFLPIYCELSTIVGQSLNDVARMTSGQLVEWLLMRYATPRGELIPNHPAGEEYAARARATYAGGYVREPKRGLVEHIAVFDFRSFGPSIIVSHNIDPSTLIVGNCEENRAPELEYCFSLEREGFIPAILKELIRRRAEIKRELKRSEGDRRRTLSFAEKALKILANSFYGYMGYPRARWYRRECAESVAAFARMYIKQVMRIAEEEFKLEVVYGDTDSLFVVIPPEKRELAQKFLQKVNESMPGIIELEFEGFYRRGLFVTKKRYALLSEDGKMVVKGLEFVRRDWAPIARETQKEVLRILLEEADPEKAARLVRDVIERIRQRRVSLEDITIYTQLTKRIKSYKSLEPHVVAAQKLKERGREVAPGMIIGYIITKGTKGISQRATPVEFARLEDYDPEYYIDNQILPAIQRIFEAIGYTRDYLKEGITQTSLSRWF

SEQ ID NO: 2643 - protein, 792 aa, unidentified
  REGION 1..792: note = Description of Unknown: Synthetic polypeptide
MPRILKGFLIDADFETVEGRALIRLFLRGEEGSFVVYDDSFSPYFYALPGDEPERVKERILASGAAEAIQKVEIEEKRLFGTPRVALRITVSHPQDVPRIRERIRRVEGVDLILEHDILFVRRRLIDRGIKPLTWLRLEVEERDGRALLRGVEQLEEEPPELRVAAFAIAVYNPKGAPRSSKDEIIMISVATSDGVEKVLTWREVQGLEQVEVLQDEKEMLLRFAELIKEGDYDVIVGYNTDSFDFPYIRDRLKKLGISLPLGRLDAELEVSRRGALPEARIRGRAHVDLYPIVRRHVKLNSYDLESVVEELLGIKKEKLDGERLFTYWDEGGEKRALLARYALEDARVTLALAEKFLPLYCELSTIVGQSLNDVARMTSGQLVEWLLMRYATPRGELIPNHPAGEEYAARARATYAGGYVREPKRGLVEHIAVFDFRSFGPSIIVSHNIDPSTLIVGNCEENRAPELEYCFSLEREGFIPAILKELIRRRAEIKRELKRSEGDRRRTLSFAEKALKILANSFYGYMGYPRARWYRRECAESVAAFARMYIKQVMRIAEEEFKLEVVYGDTDSLFVVIPPEKRELAQKFLQKVNESMPGIIELEFEGFYRRGLFVTKKRYALLSEDGKMVVKGLEFVRRDWAPIARETQKEVLRILLEEADPEKAARLVRDVIERIRQRRVSLEDITIYTQLTKRIKSYKSLEPHVVAAQKLKERGREVAPGMIIGYIITKGTKGISQRATPVEFARLEDYDPEYYIDNQILPAIQRIFEAIGYTRDYLKEGITQTSLSRWF

SEQ ID NO: 2644 - protein, 787 aa, unidentified
  REGION 1..787: note = Description of Unknown: Synthetic polypeptide
MPRILKGFLIDADFETVEGRALIRLFLRGEEGSFVVYDDSFSPYFYALPGDEPERVKERILASGAAEAIQKVEIEEKRLFGTPRVALRITVSHPQDVPRIRERIRRVEGVDLILEHDILFVRRYLIDRGIKPLTWLRLEVEERDGRALLRGVEQLELRVAAVAIAVYNPKGAPRSSKDEIIMISVATSDGVEKVLTWREVQGLEQVEVLQDEKEMLLRFAELIKEGDYDVIVGYNTDSFDFPYIRDRLKKLGISLPLGRLDAELEVSRRGALPEARIRGRAHVDLYPIVRRHVKLNSYDLESVVEELLGIKKEKLDGERLFTYWDEGGEKRALLARYALEDARVTLALAEKFLPLYCELSTIVGQSLNDVARMTSGQLVEWLLMRYATPRGELIPNHPAGEEYAARARATYAGGYVREPKRGLVEHIAVFDFRSFGPSIIVSHNIDPSTLIVGNCEENRAPELEYCFSLEREGFIPAILKELIRRRAEIKRELKRSEGDRRRTLSFAEKALKILANSFYGYMGYPRARWYRRECAESVAAFARMYIKQVMRIAEEEFKLEVVYGDTDSLFVVIPPEKRELAQKFLQKVNESMPGIIELEFEGFYRRGLFVTKKRYALLSEDGKMVVKGLEFVRRDWAPIARETQKEVLRILLEEADPEKAARLVRDVIERIRQRRVSLEDITIYTQLTKRIKSYKSLEPHVVAAQKLKERGREVAPGMIIGYIITKGTKGISQRATPVEFARLEDYDPEYYIDNQILPAIQRIFEAIGYTRDYLKEGITQTSLSRWF

SEQ ID NO: 2645 - protein, 792 aa, unidentified
  REGION 1..792: note = Description of Unknown: Synthetic polypeptide
MPRILKGFLIDADFETVEGRALIRLFLRGEEGSFVVYDDSFSPYFYALPGDEPERVKERILASGAAEAIQKVEIEEKRLFGTPRVALRITVSHPQDVPRIRERIRRVEGVDLILEHDILFVRRRLIDRGIKPLTWLRLEVEERDGRALLRGVEQLEEEPPELRVAAVAIAVYNPKGAPRSSKDEIIMISVATSDGVEKVLTWREVQGLEQVEVLQDEKEMLLRFAELIKEGDYDVIVGYNTDSFDFPYIRDRLKKLGISLPLGRLDAELEVSRRGALPEARIRGRAHVDLYPIVRRHVKLNSYDLESVVEELLGIKKEKLDGERLFTYWDEGGEKRALLARYALEDARVTLALAEKFLPLYCELSTIVGQSLNDVARMTSGQLVEWLLMRYATPRGELIPNHPAGEEYAARARATYAGGYVREPKRGLVEHIAVLDFRSFGPSIIVSHNIDPSTLIVGNCEENRAPELEYCFSLEREGFIPAILKELIRRRAEIKRELKRSEGDRRRTLSFAEKALKILANSFYGYMGYPRARWYRRECAESVAAFARMYIKQVMRIAEEEFKLEVVYGDTDSLFVVIPPEKRELAQKFLQKVNESMPGIIELEFEGFYRRGLFVTKKRYALLSEDGKMVVKGLEFVRRDWAPIARETQKEVLRILLEEADPEKAARLVRDVIERIRQRRVSLEDITIYTQLTKRIKSYKSLEPHVVAAQKLKERGREVAPGMIIGYIITKGTKGISQRATPVEFARLEDYDPEYYIDNQILPAIQRIFEAIGYTRDYLKEGITQTSLSRWF

SEQ ID NO: 2646 - protein, 792 aa, unidentified
  REGION 1..792: note = Description of Unknown: Synthetic polypeptide
MPRILKGFLIDADFETVEGRALIRLFLRGEEGSFVVYDDSFSPYFYALPGDEPERVKERILASGAAEAIQKVEIEEKRLFGTPRVALRITVSHPQDVPRIRERIRRVEGVDLILEHDILFVRRRLIDRGIKPLTWLRLEVEERDGRALLRGVEQLEEEPPELRVAAVAIAVYNPKGAPRSSKDEIIMISVATSDGVEKVLTWREVQGLEQVEVLQDEKEMLLRFAELIKEGDYDVIVGYNTDSFDFPYIRDRLKKLGISLPLGRLDAELEVSRRGALPEARIRGRAHVDLYPIVRRHVKLNSYDLESVVEELLGIKKEKLDGERLFTYWDEGGEKRALLARYSLEDARVTLALAEKFLPLYCELSTIVGQSLNDVARMTSGQLVEWLLMRYATPRGELIPNHPAGEEYAARARATYAGGYVREPKRGLVEHIAVFDFRSFGPSIIVSHNIDPSTLIVGNCEENRAPELEYCFSLEREGFIPAILKELIRRRAEIKRELKRSEGDRRRTLSFAEKALKILANSFYGYMGYPRARWYRRECAESVAAFARMYIKQVMRIAEEEFKLEVVYGDTDSLFVVIPPEKRELAQKFLQKVNESMPGIIELEFEGFYRRGLFVTKKRYALLSEDGKMVVKGLEFVRRDWAPIARETQKEVLRILLEEADPEKAARLVRDVIERIRQRRVSLEDITIYTQLTKRIKSYKSLEPHVVAAQKLKERGREVAPGMIIGYIITKGTKGISQRATPVEFARLEDYDPEYYIDNQILPAIQRIFEAIGYTRDYLKEGITQTSLSRWF

SEQ ID NO: 2647 - protein, 792 aa, unidentified
  REGION 1..792: note = Description of Unknown: Synthetic polypeptide
MPRILKGFLIDADFETVEGRALIRLFLRGEEGSFVVYDDSFSPYFYALPGDEPERVKERILASGAAEAIQKVEIEEKRLFGTPRVALRITVSHPQDVPRIRERIRRVEGVDLILEHDILFVRRRLIDRGIKPLTWLRLEVEERDGRALLRGVEQLEEEPPELRVAAVAIIVYNPKGAPRSSKDEIIMISVATSDGVEKVLTWREVQGLEQVEVLQDEKEMLLRFAELIKEGDYDVIVGYNTDSFDFPYIRDRLKKLGISLPLGRLDAELEVSRRGALPEARIRGRAHVDLYPIVRRHVKLNSYDLESVVEELLGIKKEKLDGERLFTYWDEGGEKRALLARYALEDARVTLALAEKFLPLYCELSTIVGQSLNDVARMTSGQLVEWLLMRYATPRGELIPNHPAGEEYAARARATYAGGYVREPKRGLVEHIAVFDFRSFGPSIIVSHNIDPSTLIVGNCEENRAPELEYCFSLEREGFIPAILKELIRRRAEIKRELKRSEGDRRRTLSFAEKALKILANSFYGYMGYPRARWYRRECAESVAAFARMYIKQVMRIAEEEFKLEVVYGDTDSLFVVIPPEKRELAQKFLQKVNESMPGIIELEFEGFYRRGLFVTKKRYALLSEDGKMVVKGLEFVRRDWAPIARETQKEVLRILLEEADPEKAARLVRDVIERIRQRRVSLEDITIYTQLTKRIKSYKSLEPHVVAAQKLKERGREVAPGMIIGYIITKGTKGISQRATPVEFARLEDYDPEYYIDNQILPAIQRIFEAIGYTRDYLKEGITQTSLSRWF

SEQ ID NO: 2648 - protein, 792 aa, unidentified
  REGION 1..792: note = Description of Unknown: Synthetic polypeptide
MPRILKGFLIDADFETVEGRALIRLFLRGEEGSFVVYDDSFSPYFYALPGDEPERVKERILASGAAEAIQKVEIEEKRLFGTPRVALRITVSHPQDVPRIRERIRRVEGVDLILEHDILFVRRRLIDRGIKPLTWLRLEVEERDGRALLRGVEQLEEEPPELRVAAVAIAVYNPKGAPRSSKDEIIMISVATSDGVEKVLTWREVQGLEQVEVLQDEKEMLLRFAELIKEGDYDVIVGYNTDSFDFPYIRDRLKKLGISLPLGRLDAELEVSRRGALPEARIRGRAHVDLYPIVRRHVKLNSYDLESVVEELLGIKKEKLDGERLFTYWDEGGEKRALLARYALEDARVTLALAEKFLPLYCELSTIVGQSLNDVARMTSGQLVEWLLMRYATPRGELIPNHPAGEEYAARARATYAGGYVREPKRGLVEHIAVFDFRSFGPSIIVSHNIDPSTLIVGNCEENRAPELEYCFSLEREGFIPAILKELIRRRAEIKRELKRSEGDRRRTLSFAEKALKILANSFYGYMGYPRARWYRRECAESVAAFARMYIKQVMRIAEEEFKLEVVYGDTDSLFVVIPPEKRELAQKFLQKVNESMPGIIELEFEGFYRRGLFVTKKRYALLSEDGKMVVKGLEFVRRDWAPIARETQKEVLRILLEEADPEKAARLVRDVIERIRQRRVSLEDITIYTQLTKRIKSYKSLEPHVVAAQKLKERGREVAPGMIIGYIITKGTKGISQRATPVEFARLEDYDPEYYIDNQILPAIQRIFEAIGYTRDYLKEGITQTSLSRRF

SEQ ID NO: 2649 - protein, 792 aa, unidentified
  REGION 1..792: note = Description of Unknown: Synthetic polypeptide
MPRILKGFLIDADFETVEGRALIRLFLRGEEGSFVVYDDSFSPYFYALPGDEPERVKERILASGAAEAIQKVEIEEKRLFGTPRVALRITVSHPQDVPRIRERIRRVEGVDLILEHDILFVRRRLIDRGIKPLTWLRLEVEERDGRALLRGVEQLEEEPPELRVAAVAIAVYNPKGAPRSSKDEIIMISVATSDGVEKVLTWREVQGLEQVEVLQDEKEMLLRFAELIKEGDYDVIVGYNTDSFDFPYIRDRLKKLGISLPLGRLDAELEVSRRGALPEARIRGRAHVDLYPIVRRHVKLNSYDLESVVEELLGIKKEKLDGERLFTYWDEGGEKRALLARYALEDARVTLALAEKFLPLYCELSTIVGQSLNDVARMTSGQLVEWLLMRYATPRGELIPNHPAGEEYAARARATYAGGYVREPKRGLVEHIAVFDFRSFGPSIIVSHNIDPSTLIVGNCEENRAPELEYCFSLEREGFIPAILKELIRRRAEIKRELKRSEGDRRRTLSFAEKALKILANSFYGYMGYPRARWYRRECAESVAAFARMYIKQVMRIAEEEFKLEVVYGDTDSLFVVIPGEKRELAQKFLQKVNESMPGIIELEFEGFYRRGLFVTKKRYALLSEDGKMVVKGLEFVRRDWAPIARETQKEVLRILLEEADPEKAARLVRDVIERIRQRRVSLEDITIYTQLTKRIKSYKSLEPHVVAAQKLKERGREVAPGMIIGYIITKGTKGISQRATPVEFARLEDYDPEYYIDNQILPAIQRIFEAIGYTRDYLKEGITQTSLSRWF

SEQ ID NO: 2650 - protein, 792 aa, unidentified
  REGION 1..792: note = Description of Unknown: Synthetic polypeptide
MPRILKGFLIDADFETVEGRALIRLFLRGEEGSFVVYDDSFSPYFYALPGDEPERVKERILASGAAEAIQKVEIEEKRLFGTPRVALRITVSHPQDVPRIRERIRRVEGVDLILEHDILFVRRRLIDRGIKPLTWLRLEVEERDGRALLRGVEQLEEEPPELRVAAVAIAVYNPKGAPRSSKDEIIMISVATSDGVEKVLTWREVQGLEQVEVLQDEKEMLLRFAELIKEGDYDVIVGYNTDSFDFPYIRDRLKKLGISLPLGRLDAELEVSRRGALPEARIRGRAHVDLYPIVRRHVKLNSYDLESVVEELLGIKKEKLDGERLFTYWDEGGEKRALLARYALEDARVTLALAEKFLPLYCELSTIVGQSLNDVARMTSGQLVEWLLMRYATPRGELIPNHPAGEEYAARARATYAGGYVREPKRGLVEHIAVFDFRSFGPSIIVSHNIDPSTLIVGNCEENRAPELEYCFSLEREGFIPAILKELIRRRAEIKRELKRSEGDRRRTLSFAEKALKILANSFYGYMGYPRARWYRRECAESVAAFARMYIKQVMRIAEEEFKLEVVYGDTDSLFVVIPPEKRELAQKFLQKVNESMPGIIELEFEGFYRRGLFVTKKRYALLSEDGKMVVKGLEFVRRDWAPIARETQKEVLRIILEEADPEKAARLVRDVIERIRQRRVSLEDITIYTQLTKRIKSYKSLEPHVVAAQKLKERGREVAPGMIIGYIITKGTKGISQRATPVEFARLEDYDPEYYIDNQILPAIQRIFEAIGYTRDYLKEGITQTSLSRWF

SEQ ID NO: 2651 - protein, 792 aa, unidentified
  REGION 1..792: note = Description of Unknown: Synthetic polypeptide
MPRILKGFLIDADFETVEGRALIRLFLRGEEGSFVVYDDSFSPYFYALPGDEPERVKERILASGAAEAIQKVEIEEKRLFGTPRVALRITVSHPQDVPRIRERIRRVEGVDLILEHDILFVRRRLIDRGIKPLTWLRLEVEERDGRALLRGVEQLEEEPPELRVAAVAIAVYNPKGAPRSSKDEIIMISVATSDGVEKVLTWREVQGLEQVEVLQDEKEMLLRFAELIKEGDYDVIVGYNTDSFDFPYIRDRLKKLGISLPLGRLDAELEVSRRGALPEARIRGRAHVDLYPIVRRHVKLNSYDLESVVEELLGIKKEKLDGERLFTYWDEGGEKRALLARYALEDARVTLALAEKFLPLYCELSTIVGQSLNDVARMTSGQLVEWLLMRYATPRGELIPNHPAGEEYAARARATYAGGYVREPKRGLVEHIAVFDFRSFGPSIIVSHNIDPSTLIVGNCEENRAPELEYCFSLEREGFIPAILKELIRRRAEIKRELKRSEGDRRRTLSFAEKALKILANSFYGYMGYPRARWYRRECAESVAAFARMYIKQVMRIAEEEFKFEVVYGDTDSLFVVIPPEKRELAQKFLQKVNESMPGIIELEFEGFYRRGLFVTKKRYALLSEDGKMVVKGLEFVRRDWAPIARETQKEVLRILLEEADPEKAARLVRDVIERIRQRRVSLEDITIYTQLTKRIKSYKSLEPHVVAAQKLKERGREVAPGMIIGYIITKGTKGISQRATPVEFARLEDYDPEYYIDNQILPAIQRIFEAIGYTRDYLKEGITQTSLSRWF

SEQ ID NO: 2652 - protein, 792 aa, unidentified
  REGION 1..792: note = Description of Unknown: Synthetic polypeptide
MPRILKGFLIDADFETVEGRALIRLFLRGEEGSFVVYDDSFSPYFYALPGDEPERVKERILASGAAEAIQKVEIEEKRLFGTPRVALRITVSHPQDVPRIRERIRRVEGVDLILEHDILFVRRRLIDRGIKPLTWLRLEVEERDGRALLRGVEQLEEEPPELRVAAVAIAVYNPKGAPRSSKDEIIMISVATSDGVEKVLTWREVQGLEQVEVLQDEKEILLRFAELIKEGDYDVIVGYNTDSFDFPYIRDRLKKLGISLPLGRLDAELEVSRRGALPEARIRGRAHVDLYPIVRRHVKLNSYDLESVVEELLGIKKEKLDGERLFTYWDEGGEKRALLARYALEDARVTLALAEKFLPLYCELSTIVGQSLNDVARMTSGQLVEWLLMRYATPRGELIPNHPAGEEYAARARATYAGGYVREPKRGLVEHIAVFDFRSFGPSIIVSHNIDPSTLIVGNCEENRAPELEYCFSLEREGFIPAILKELIRRRAEIKRELKRSEGDRRRTLSFAEKALKILANSFYGYMGYPRARWYRRECAESVAAFARMYIKQVMRIAEEEFKLEVVYGDTDSLFVVIPPEKRELAQKFLQKVNESMPGIIELEFEGFYRRGLFVTKKRYALLSEDGKMVVKGLEFVRRDWAPIARETQKEVLRILLEEADPEKAARLVRDVIERIRQRRVSLEDITIYTQLTKRIKSYKSLEPHVVAAQKLKERGREVAPGMIIGYIITKGTKGISQRATPVEFARLEDYDPEYYIDNQILPAIQRIFEAIGYTRDYLKEGITQTSLSRWF

SEQ ID NO: 2653 - protein, 792 aa, unidentified
  REGION 1..792: note = Description of Unknown: Synthetic polypeptide
MPRILKGFLIDADFETVEGRALIRLFLRGEEGSFVVYDDSFSPYFYALPGDEPERVKERILASGAAEAIQKVEIEEKRLFGTPRVALRITVSHPQDVPRIRERIRRVEGVDLILEHDILFVRRRLIDRGIKPLTWLRLEVEERDGRALLRGVEQLEEEPPELRVAAVAIAVYNPKGAPRSSKDEIIMISVATSDGVEKVLTWREVQGLEQVEVLQDEKEMLLRFAELIKEGDYDVIVGYNTDSFDFPYIRDRLKKLGISLPLGRLDAELEVSRRGALPEARIRGRAHVDLYPIVRRHVKLNSYDLESVVEELLGIKKEKLDGERLFTYWDEGGERRALLARYALEDARVTLALAEKFLPLYCELSTIVGQSLNDVARMTSGQLVEWLLMRYATPRGELIPNHPAGEEYAARARATYAGGYVREPKRGLVEHIAVFDFRSFGPSIIVSHNIDPSTLIVGNCEENRAPELEYCFSLEREGFIPAILKELIRRRAEIKRELKRSEGDRRRTLSFAEKALKILANSFYGYMGYPRARWYRRECAESVAAFARMYIKQVMRIAEEEFKLEVVYGDTDSLFVVIPPEKRELAQKFLQKVNESMPGIIELEFEGFYRRGLFVTKKRYALLSEDGKMVVKGLEFVRRDWAPIARETQKEVLRILLEEADPEKAARLVRDVIERIRQRRVSLEDITIYTQLTKRIKSYKSLEPHVVAAQKLKERGREVAPGMIIGYIITKGTKGISQRATPVEFARLEDYDPEYYIDNQILPAIQRIFEAIGYTRDYLKEGITQTSLSRWF

SEQ ID NO: 2654 - protein, 792 aa, unidentified
  REGION 1..792: note = Description of Unknown: Synthetic polypeptide
MPRILKGFLIDADFETVEGRALIRLFLRGEEGSFVVYDDSFSPYFYALPGDEPERVKERILASGAAEAIQKVEIEEKRLFGTPRVALRITVSHPQDVPRIRERIRRVEGVDLILEHDILFVRRRLIDRGIKPLTWLRLEVEERDGRALLRGVEQLEEEPPELRVAAVAIAVYNPKGAPRSSKDEIIMISVATSDGVEKVLTWREVQGLEQVEVLQDEKEMLLRFAELIKEGDYDVIVGYNTDSFDFPYIRDRLKKLGISLPLGRLDAELEVSRRGALPEARIRGRAHVDLYPIVRRHVKLNSYDLESVVEELLGIKKEKLDGERLFTYWDEGGEKRALLARYALEDARVTLALAEKFLPLYCELSTIVGQSLNDVARMTSGQLVEWLLMRYATPRGELIPNHPAGEEYAARARATYAGGYVREPKRGLVEHIAVFDFRSFAPSIIVSHNIDPSTLIVGNCEENRAPELEYCFSLEREGFIPAILKELIRRRAEIKRELKRSEGDRRRTLSFAEKALKILANSFYGYMGYPRARWYRRECAESVAAFARMYIKQVMRIAEEEFKLEVVYGDTDSLFVVIPPEKRELAQKFLQKVNESMPGIIELEFEGFYRRGLFVTKKRYALLSEDGKMVVKGLEFVRRDWAPIARETQKEVLRILLEEADPEKAARLVRDVIERIRQRRVSLEDITIYTQLTKRIKSYKSLEPHVVAAQKLKERGREVAPGMIIGYIITKGTKGISQRATPVEFARLEDYDPEYYIDNQILPAIQRIFEAIGYTRDYLKEGITQTSLSRWF

SEQ ID NO: 2655 - protein, 769 aa, unidentified
  REGION 1..769: note = Description of Unknown: Synthetic polypeptide
MPRILKGFLIDADFETVEGRALIRLFLRGEEGSFVVYDDSFSPYFYALPGDEPERVKERILASGAAEAIQKVEIEEKRLFGTPRVALRITVSHPQDVPRIRERIRRVEGVDLILEHDILFVRRYLIDRGEQLEEEPPELRVAAVAIAVYNPKGAPRSSKDEIIMISVATSDGVEKVLTWREVQGLEQVEVLQDEKEMLLRFAELIKEGDYDVIVGYNTDSFDFPYIRDRLKKLGISLPLGRLDAELEVSRRGALPEARIRGRAHVDLYPIVRRHVKLNSYDLESVVEELLGIKKEKLDGERLFTYWDEGGEKRALLARYALEDARVTLALAEKFLPLYCELSTIVGQSLNDVARMTSGQLVEWLLMRYATPRGELIPNHPAGEEYAARARATYAGGYVREPKRGLVEHIAVFDFRSFGPSIIVSHNIDPSTLIVGNCEENRAPELEYCFSLEREGFIPAILKELIRRRAEIKRELKRSEGDRRRTLSFAEKALKILANSFYGYMGYPRARWYRRECAESVAAFARMYIKQVMRIAEEEFKLEVVYGDTDSLFVVIPPEKRELAQKFLQKVNESMPGIIELEFEGFYRRGLFVTKKRYALLSEDGKMVVKGLEFVRRDWAPIARETQKEVLRILLEEADPEKAARLVRDVIERIRQRRVSLEDITIYTQLTKRIKSYKSLEPHVVAAQKLKERGREVAPGMIIGYIITKGTKGISQRATPVEFARLEDYDPEYYIDNQILPAIQRIFEAIGYTRDYLKEGITQTSLSRWF

SEQ ID NO: 2656 - protein, 792 aa, unidentified
  REGION 1..792: note = Description of Unknown: Synthetic polypeptide
MPRILKGFLIDADFETVEGRALIRLFLRGEEGSFVVYDDSFSPYFYALPGDEPERVKERILASGAAEAIQKVEIEEKRLFGTPRVALRITVSHPQDVPRIRERIRRVEGVDLILEHDILFVRRRLIDRGIKPLTWLRLEVEERDGRALLRGVEQLEEEPPELRVAAVAILVYNPKGAPRSSKDEIIMISVATSDGVEKVLTWREVQGLEQVEVLQDEKEMLLRFAELIKEGDYDVIVGYNTDSFDFPYIRDRLKKLGISLPLGRLDAELEVSRRGALPEARIRGRAHVDLYPIVRRHVKLNSYDLESVVEELLGIKKEKLDGERLFTYWDEGGEKRALLARYALEDARVTLALAEKFLPLYCELSTIVGQSLNDVARMTSGQLVEWLLMRYATPRGELIPNHPAGEEYAARARATYAGGYVREPKRGLVEHIAVFDFRSFGPSIIVSHNIDPSTLIVGNCEENRAPELEYCFSLEREGFIPAILKELIRRRAEIKRELKRSEGDRRRTLSFAEKALKILANSFYGYMGYPRARWYRRECAESVAAFARMYIKQVMRIAEEEFKLEVVYGDTDSLFVVIPPEKRELAQKFLQKVNESMPGIIELEFEGFYRRGLFVTKKRYALLSEDGKMVVKGLEFVRRDWAPIARETQKEVLRILLEEADPEKAARLVRDVIERIRQRRVSLEDITIYTQLTKRIKSYKSLEPHVVAAQKLKERGREVAPGMIIGYIITKGTKGISQRATPVEFARLEDYDPEYYIDNQILPAIQRIFEAIGYTRDYLKEGITQTSLSRWF

SEQ ID NO: 2657 - protein, 792 aa, unidentified
  REGION 1..792: note = Description of Unknown: Synthetic polypeptide
MPRILKGFLIDADFETVEGRALIRLFLRGEEGSFVVYDDSFSPYFYALPGDEPERVKERILASGAAEAIQKVEIEEKRLFGTPRVALRITVSHPQDVPRIRERIRRVEGVDLILEHDILFVRRRLIDRGIKPLTWLRLEVEERDGRALLRGVEQLEEEPPELRVAAVAIAVYNPKGAPRSSKDEIIMISVATSDGVEKVLTWREVQGLEQVEVLQDEKEMLLRFAELIKEGDYDVIVGYNTDSFDFPYIRDRLKKLGISLPLGRLDAELEVSRRGALPEARIRGRAHVDLYPIVRRHVKLNSYDLESVVEELLGIKKEKLDGERLFTYWDEGGEKRALLARYALEDARVTLALAEKFLPLYCELSTIVGQSLNDVARMTSGQLVEWLLMRYATPRGELIPNHPAGEEYAARARATYAGGYVREPKRGLVEHIAVFDFRSFGPSIIVSHNIDPSTLIVGNCEENRAPELEYCFSLEREGFIPAILKELIRRRAEIKRELKRSEGDRRRTLSFAEKALKILANSFYGYMGYPRARWYRRECAESVAAWARMYIKQVMRIAEEEFKLEVVYGDTDSLFVVIPPEKRELAQKFLQKVNESMPGIIELEFEGFYRRGLFVTKKRYALLSEDGKMVVKGLEFVRRDWAPIARETQKEVLRILLEEADPEKAARLVRDVIERIRQRRVSLEDITIYTQLTKRIKSYKSLEPHVVAAQKLKERGREVAPGMIIGYIITKGTKGISQRATPVEFARLEDYDPEYYIDNQILPAIQRIFEAIGYTRDYLKEGITQTSLSRWF

SEQ ID NO: 2658 - protein, 792 aa, unidentified
  REGION 1..792: note = Description of Unknown: Synthetic polypeptide
MPRILKGFLIDADFETVEGRALIRLFLRGEEGSFVVYDDSFSPYFYALPGDEPERVKERILASGAAEAIQKVEIEEKRLFGTPRVALRITVSHPQDVPRIRERIRRVEGVDLILEHDILFVRRRLIDRGIKPLTWLRLEVEERDSRALLRGVEQLEEEPPELRVAAVAIAVYNPKGAPRSSKDEIIMISVATSDGVEKVLTWREVQGLEQVEVLQDEKEMLLRFAELIKEGDYDVIVGYNTDSFDFPYIRDRLKKLGISLPLGRLDAELEVSRRGALPEARIRGRAHVDLYPIVRRHVKLNSYDLESVVEELLGIKKEKLDGERLFTYWDEGGEKRALLARYALEDARVTLALAEKFLPLYCELSTIVGQSLNDVARMTSGQLVEWLLMRYATPRGELIPNHPAGEEYAARARATYAGGYVREPKRGLVEHIAVFDFRSFGPSIIVSHNIDPSTLIVGNCEENRAPELEYCFSLEREGFIPAILKELIRRRAEIKRELKRSEGDRRRTLSFAEKALKILANSFYGYMGYPRARWYRRECAESVAAFARMYIKQVMRIAEEEFKLEVVYGDTDSLFVVIPPEKRELAQKFLQKVNESMPGIIELEFEGFYRRGLFVTKKRYALLSEDGKMVVKGLEFVRRDWAPIARETQKEVLRILLEEADPEKAARLVRDVIERIRQRRVSLEDITIYTQLTKRIKSYKSLEPHVVAAQKLKERGREVAPGMIIGYIITKGTKGISQRATPVEFARLEDYDPEYYIDNQILPAIQRIFEAIGYTRDYLKEGITQTSLSRWF

SEQ ID NO: 2659 - protein, 792 aa, unidentified
  REGION 1..792: note = Description of Unknown: Synthetic polypeptide
MPRILKGFLIDADFETVEGRALIRLFLRGEEGSFVVYDDSFSPYFYALPGDEPERVKERILASGAAEAIQKVEIEEKRLFGTPRVALRITVSHPQDVPRIRERIRRVEGVDLILEHDILFVRRRLIDRGIKPLTWLRLEVEERDGRALLRGVEQLEEEPPELRVAAVAIAVYNPKGAPRSSKDEIIMISVATSDGVEKVLTWREVQGLEQVEVLQDEKEMLLRFAELIKEGDYDVIVGYNTDSFDFPYIRDRLKKLGISLPLGRLDAELEVSRRGALPEARIRGRAHVDLYPIVRRHVKLNSYDLESVVEELLGIKKEKLDGERLFTYWDEGGEKRALLARYALEDARVTLALAEKFLPLYCELSTIVGQSLNDVARMTSGQLVEWLLMRYATPRGELIPNHPAGEEYAARARATYAGGYVREPKRGLVEHIAVFDFRSFGPSIIVSHNIDPSTLIVGNCEENRAPELEYCFSLEREGFIPAILKELIRRRAEIKRELKRSEGDRRRTLSFAEKALKILANSFYGYMGYPRARWYRRECAESVAAFARMYIKQVMRIAEEEFKLEVVYGDTDSLFVVIPPEKRELAQKFLQKVNESMPGIIELEFEGFYRRGLFVTKKRYALLSEDGKMVVKGLEFVRRDWAPIARETQKEVLRILLEEADPEKAARLVRDVIERIRQRRVSLEDITIYTQLTKRIKSYKSLEPHVVAAQKLKERGREVAPGMIIGYIITKGTKGISQRATPVEFARLEDYDPEYYIDNQILPAIQRIFEAFGYTRDYLKEGITQTSLSRWF

SEQ ID NO: 2660 - protein, 792 aa, unidentified
  REGION 1..792: note = Description of Unknown: Synthetic polypeptide
MPRILKGFLIDADFETVEGRALIRLFLRGEEGSFVVYDDSFSPYFYALPGDEPERVKERILASGAAEAIQKVEIEEKRLFGTPRVALRITVSHPQDVPRIRERIRRVEGVDLILEHDILFVRRRLIDRGIKPLTWLRLEVEERDGRALLRGVEQLEEEPPELRVAAVAIAVYNPKGAPRSSKDEIIMISVATSDGVEKVLTWREVQGLEQVEVLQDEKEMLLRFAELIKEGDYDVIVGYNTDSFDFPYIRDRLKKLGISLPLGRLDAELEVSRRGALPEARIRGRAHVDLYPIVRRHVKLNSYDLESVVEELLGIKKEKLDGERLFTYWDEGGEKRALLARYALEDARVTLALAEKFLPLYCELSTIVGQSLNDVARMTSGQLVEWLLMRYATPRGELIPNHPAGEEYAARARATYAGGYVREPKRGLVEHIAVFDFRSFGPSIIVSHNIDPSTLIVGNCEENRAPELEYCFSLEREGFIPAILKELIRRRAEIKRELKRSEGDRRRTLSFAEKALKILANSFYGYMGYPRARWYRRECAESVAAFARMYIKQVMRIAEEEFKLEVVYGDTDSLFVVIPPEKRELAQKFLQKVNESMPGIIELEFEGFYRRGLFVTKKRYALLSEDGKMVVKGLEFVRRDWAPIARETQKEVLRILLEEADPEKAARLVRDVIERIRQRRVSLEDITIYTQLTKRIKSYKSLEPHVVAAQKLKERGREVAPGMIIGYIITKGTKGISQRATPVEFARLEDYDPEYYIDNQILPAIQRIFEAIGYTRDYLKEGITQTSLSRDF

SEQ ID NO: 2661 - protein, 792 aa, unidentified
  REGION 1..792: note = Description of Unknown: Synthetic polypeptide
MPRILKGFLIDADFETVEGRALIRLFLRGEEGSFVVYDDSFSPYFYALPGDEPERVKERILASGAAEAIQKVEIEEKRLFGTPRVALRITVSHPQDVPRIRERIRRVEGVDLILEHDILFVRRRLIDRGIKPLTWLRLEVEERDGRALLRGVEQLEEEPPELRVAAVAIAVYNPKGAPRSSKDEIIMISVATSDGVEKVLTWREVQGLEQVEVLQDEKEMLLRFAELIKEGDYDVIVGYNTDSFDFPYIRDRLKKLGISLPLGRLDAELEVSRRGALPEARIRGRAHVDLYPIVRRHVKLNSYDLESVVEELLGIKKEKLDGERLFTYWDNGGEKRALLARYALEDARVTLALAEKFLPLYCELSTIVGQSLNDVARMTSGQLVEWLLMRYATPRGELIPNHPAGEEYAARARATYAGGYVREPKRGLVEHIAVFDFRSFGPSIIVSHNIDPSTLIVGNCEENRAPELEYCFSLEREGFIPAILKELIRRRAEIKRELKRSEGDRRRTLSFAEKALKILANSFYGYMGYPRARWYRRECAESVAAFARMYIKQVMRIAEEEFKLEVVYGDTDSLFVVIPPEKRELAQKFLQKVNESMPGIIELEFEGFYRRGLFVTKKRYALLSEDGKMVVKGLEFVRRDWAPIARETQKEVLRILLEEADPEKAARLVRDVIERIRQRRVSLEDITIYTQLTKRIKSYKSLEPHVVAAQKLKERGREVAPGMIIGYIITKGTKGISQRATPVEFARLEDYDPEYYIDNQILPAIQRIFEAIGYTRDYLKEGITQTSLSRWF

SEQ ID NO: 2662 - protein, 792 aa, unidentified
  REGION 1..792: note = Description of Unknown: Synthetic polypeptide
MPRILKGFLIDADFETVEGRALIRLFLRGEEGSFVVYDDSFSPYFYALPGDEPERVKERILASGAAEAIQKVEIEEKRLFGTPRVALRITVSHPQDVPRIRERIRRVEGVDLILEHDILFVRRRLIDRGIKPLTWLRLEVEERDGRALLRGVEQLEEEPPELRVAAVAIAVYNPKGAPRSSKDEIIMISVATSDGVEKVLTWREVQGLEQVEVLQDEKEMLLRFAELIKEGDYDVIVGYNTDSFDFPYIRDRLKKLGISLPLGRLDAELEVSRRGALPEARIRGRAHVDLYPIVRRHVKLNSYDLEAVVEELLGIKKEKLDGERLFTYWDEGGEKRALLARYALEDARVTLALAEKFLPLYCELSTIVGQSLNDVARMTSGQLVEWLLMRYATPRGELIPNHPAGEEYAARARATYAGGYVREPKRGLVEHIAVFDFRSFGPSIIVSHNIDPSTLIVGNCEENRAPELEYCFSLEREGFIPAILKELIRRRAEIKRELKRSEGDRRRTLSFAEKALKILANSFYGYMGYPRARWYRRECAESVAAFARMYIKQVMRIAEEEFKLEVVYGDTDSLFVVIPPEKRELAQKFLQKVNESMPGIIELEFEGFYRRGLFVTKKRYALLSEDGKMVVKGLEFVRRDWAPIARETQKEVLRILLEEADPEKAARLVRDVIERIRQRRVSLEDITIYTQLTKRIKSYKSLEPHVVAAQKLKERGREVAPGMIIGYIITKGTKGISQRATPVEFARLEDYDPEYYIDNQILPAIQRIFEAIGYTRDYLKEGITQTSLSRWF

SEQ ID NO: 2663 - protein, 792 aa, unidentified
  REGION 1..792: note = Description of Unknown: Synthetic polypeptide
MPRILKGFLIDADFETVEGRALIRLFLRGEEGSFVVYDDSFSPYFYALPGDEPERVKERILASGAAEAIQKVEIEEKRLFGTPRVALRITVSHPQDVPRIRERIRRVEGVDLILEHDILFVRRRLIDRGIKPLTWLRLEVEERDGRALLRGVEQLEEEPPELRVAAVAIAVYNPKGAPRSSKDEIIMISVATSDGVEKVLTWREVQGLEQVEVLQDEKEMLLRFAELIKEGDYDVIVGYNTDSFDFPYIRDRLKKLGISLPLGRLDAELEVSRRGALPEARIRGRAHVDLYPIVRRFVKLNSYDLESVVEELLGIKKEKLDGERLFTYWDEGGEKRALLARYALEDARVTLALAEKFLPLYCELSTIVGQSLNDVARMTSGQLVEWLLMRYATPRGELIPNHPAGEEYAARARATYAGGYVREPKRGLVEHIAVFDFRSFGPSIIVSHNIDPSTLIVGNCEENRAPELEYCFSLEREGFIPAILKELIRRRAEIKRELKRSEGDRRRTLSFAEKALKILANSFYGYMGYPRARWYRRECAESVAAFARMYIKQVMRIAEEEFKLEVVYGDTDSLFVVIPPEKRELAQKFLQKVNESMPGIIELEFEGFYRRGLFVTKKRYALLSEDGKMVVKGLEFVRRDWAPIARETQKEVLRILLEEADPEKAARLVRDVIERIRQRRVSLEDITIYTQLTKRIKSYKSLEPHVVAAQKLKERGREVAPGMIIGYIITKGTKGISQRATPVEFARLEDYDPEYYIDNQILPAIQRIFEAIGYTRDYLKEGITQTSLSRWF

SEQ ID NO: 2664 - protein, 792 aa, unidentified
  REGION 1..792: note = Description of Unknown: Synthetic polypeptide
MPRILKGFLIDADFETVEGRALIRLFLRGEEGSFVVYDDSFSPYFYALPGDEPERVKERILASGAAEAIQKVEIEEKRLFGTPRVALRITVSHPQDVPRIRERIRRVEGVDLILEHDILFVRRYLIDRGIKPLTWLRLEVEERDGRALLRGVEQLEEEPPELRVAAVAIAVYNPKGAPRSSKDEIIMISVATSDGVEKVLTWREVQGLEQVEVLQDEKEMLLRFAELIKEGDYDVIVGYNTDSFDFPYIRDRLKKLGISLPLGRLDAELEVSRRGALPEARIRGRAHVDLYPIVRRHVKLNSYDLESVVEELLGIKKEKLDGERLFTYWDEGGEKRALLARYALEDARVTLALAEKFLPLYCELSTIVGQSLNDVARMTSGQLVEWLLMRYATPRGELIPNHPAGEEYAARARATYAGGYVREPKRGLVEHIAVFDFRSFGPSIIVSHNIDPSTLIVGNCEENRAPELEYCFSLEREGFIPAILKELIRRRAEIKRELKRSEGDRRRTLSFAEKALKILANSFYGYMGYPRARWYRRECAKSVAAFARMYIKQVMRIAEEEFKLEVVYGDTDSLFVVIPPEKRELAQKFLQKVNESMPGIIELEFEGFYRRGLFVTKKRYALLSEDGKMVVKGLEFVRRDWAPIARETQKEVLRILLEEADPEKAARLVRDVIERIRQRRVSLEDITIYTQLTKRIKSYKSLEPHVVAAQKLKERGREVAPGMIIGYIITKGTKGISQRATPVEFARLEDYDPEYYIDNQILPAIQRIFEAIGYTRDYLKEGITQTSLSRWF

SEQ ID NO: 2665 - protein, 792 aa, unidentified; identical to SEQ ID NO: 1978
  REGION 1..792: note = Description of Unknown: Synthetic polypeptide

SEQ ID NO: 2666 - protein, 792 aa, unidentified
  REGION 1..792: note = Description of Unknown: Synthetic polypeptide
MPRILKGFLIDADFETVEGRALIRLFLRGEEGSFVVYDDSFSPYFYALPGDEPERVKERILASGAAEAIQKVEIEEKRLFGTPRVALRITVSHPQDVPRIRERIRRVEGVDLILEHDILFVRRRLIDRGIKPLTWLRLEVEERDGRALLRGVEQLEEEPPELRVAAVAIAVYNPKGAPRSSKDEIIMISVATSDGVEKVLTWREVQGLEQVEVLQDEKEMLLRFAELIKEGDYDVIVGYNTDSFDFPYIRDRLKKLGISLPLGRLDAELEVSRRGALPEARIRGRAHVDLYPIVRRHVKLNSYDLESVVEELLGIKKEKLDGERLFTYWDEGGEKRALLARYALEDARVTLALAEKFLPLYCELSTIVGQSLNDVARMTSGQLVEWLLMRYATPRGELIPNHPAGEEYAARARATYAGGYVREPKRGLVEHIAVFDFRSFGPSIIVSHNIDPSTLIVGNCEENRAPELEYCFSLEREGFIPAILKELIRRRAEIKRELKRSEGDRRRTLSFAEKALKILANSFYGYMGYPRARWYRRECAESVAAFARMYIKQVMRIAEEEFKLEVVYGDTDSLFVVIPPEKRELAQKFLQKVNESMPGIIELEFEGFYRRGLFVTKKRYALLSEDGKMVVKGLEFVRRDWAPIARETQKEVLRILLEEADPEKAARIVRDVIERIRQRRVSLEDITIYTQLTKRIKSYKSLEPHVVAAQKLKERGREVAPGMIIGYIITKGTKGISQRATPVEFARLEDYDPEYYIDNQILPAIQRIFEAIGYTRDYLKEGITQTSLSRWF

SEQ ID NO: 2667 - protein, 761 aa, unidentified
  REGION 1..761: note = Description of Unknown: Synthetic polypeptide
MPRILKGFLIDADFETVEGRALIRLFLRGEEGSFVVYDDSFSPYFYALPGDEPERVKERILASGAAEAIQKVEIEEKRLFGTPRVALRITVSHPQDVPRIRERIRRVEGVDLILEHDILFVRRYLIDRGELRVAAVAIAVYNPKGAPRSSKDEIIMISVATSDGVEKVLTWREVQGLEQVEVLQDEKEMLLRFAELIKEGDYDVIVGYNTDSFDFPYIRDRLKKLGISLPLGRLDAELEVSRRGALPEARIRGRAHVDLYPIVRRHVKLNSYDLESVVEELLGIKKEKLDGERLFTYWDEGGEKRALLARYALEDARVTLALAEKFLPLYCELSTIVGQSLNDVARMTSGQLVEWLLMRYATPRGELIPNHPAGEEYAARARATYAGGYVREPKRGLVEHIAVFDFRSFGPSIIVSHNIDPSTLIVGNCEENRAPELEYCFSLEREGFIPAILKELIRRRAEIKRELKRSEGDRRRTLSFAEKALKILANSFYGYMGYPRARWYRRECAESVAAFARMYIKQVMRIAEEEFKLEVVYGDTDSLFVVIPPEKRELAQKFLQKVNESMPGIIELEFEGFYRRGLFVTKKRYALLSEDGKMVVKGLEFVRRDWAPIARETQKEVLRILLEEADPEKAARLVRDVIERIRQRRVSLEDITIYTQLTKRIKSYKSLEPHVVAAQKLKERGREVAPGMIIGYIITKGTKGISQRATPVEFARLEDYDPEYYIDNQILPAIQRIFEAIGYTRDYLKEGITQTSLSRWF

SEQ ID NO: 2668 - protein, 792 aa, unidentified
  REGION 1..792: note = Description of Unknown: Synthetic polypeptide
MPRILKGFLIDADFETVEGRALIRLFLRGEEGSFVVYDDSFSPYFYALPGDEPERVKERILASGAAEAIQKVEIEEKRLFGTPRVALRITVSHPQDVPRIRERIRRVEGVDLILEHDILFVRRRLIDRGIKPMTWLRLEVEERDGRALLRGVEQLEEEPPELRVAAVAIAVYNPKGAPRSSKDEIIMISVATSDGVEKVLTWREVQGLEQVEVLQDEKEMLLRFAELIKEGDYDVIVGYNTDSFDFPYIRDRLKKLGISLPLGRLDAELEVSRRGALPEARIRGRAHVDLYPIVRRHVKLNSYDLESVVEELLGIKKEKLDGERLFTYWDEGGEKRALLARYALEDARVTLALAEKFLPLYCELSTIVGQSLNDVARMTSGQLVEWLLMRYATPRGELIPNHPAGEEYAARARATYAGGYVREPKRGLVEHIAVFDFRSFGPSIIVSHNIDPSTLIVGNCEENRAPELEYCFSLEREGFIPAILKELIRRRAEIKRELKRSEGDRRRTLSFAEKALKILANSFYGYMGYPRARWYRRECAESVAAFARMYIKQVMRIAEEEFKLEVVYGDTDSLFVVIPPEKRELAQKFLQKVNESMPGIIELEFEGFYRRGLFVTKKRYALLSEDGKMVVKGLEFVRRDWAPIARETQKEVLRILLEEADPEKAARLVRDVIERIRQRRVSLEDITIYTQLTKRIKSYKSLEPHVVAAQKLKERGREVAPGMIIGYIITKGTKGISQRATPVEFARLEDYDPEYYIDNQILPAIQRIFEAIGYTRDYLKEGITQTSLSRWF

SEQ ID NO: 2669 - protein, 792 aa, unidentified
  REGION 1..792: note = Description of Unknown: Synthetic polypeptide
MPRILKGFLIDADFETVEGRALIRLFLRGEEGSFVVYDDSFSPYFYALPGDEPERVKERILASGAAEAIQKVEIEEKRLFGTPRVALRITVSHPQDVPRIRERIRRVEGVDLILEHDILFVRRYLIDRGIKPLTWLRLEVEERDGRALLRGVEQLEEEPPELRVAAVAIAVYNPKGAPRSSKDEIIMISVATSDGVEKVLTWREVQGLEQVEVLQDEKEMLLRFAELIKEGDYDVIVGYNTDSFDFPYIRDRLKKLGISLPLGRLDAELEVSRRGALPEARIRGRAHVDLYPIVRRHVKLNSYDLESVVEELLGIKKEKLDGERLFTYWDEGGEKRALLARYALEDARVTLALAEKFLPLYCELSTIVGQSLNDVARMTSGQLVEWLLMRYATPRGELIPNHPAGEEYAARARATYAGGYVREPKRGLVEHIAVFDFRSFGPSIIVSHNIDPSTLIVGNCEENRAPELEYCFSLEREGFIPAILKELIRRRAEIKRELKRSEGDRRRTLSFAEKALKILANSFYGYMGYPRARWYRRECAESVAAFARMYIKQVMRIAEEEFKLEVVYGDTDSLFVVIPPEKRELAQKFLQKVNESMPGIIELEFEGFYRRGLFVTKKRYALLSEDGKMVVKGLEFVRRDWAPIARETQKEVLRILLEEADPENAARLVRDVIERIRQRRVSLEDITIYTQLTKRIKSYKSLEPHVVAAQKLKERGREVAPGMIIGYIITKGTKGISQRATPVEFARLEDYDPEYYIDNQILPAIQRIFEAIGYTRDYLKEGITQTSLSRWF

SEQ ID NO: 2670 - protein, 792 aa, unidentified
  REGION 1..792: note = Description of Unknown: Synthetic polypeptide
MPRILKGFLIDADFETVEGRALIRLFLRGEEGSFVVYDDSFSPYFYALPGDEPERVKERILASGAAEAIQKVEIEEKRLFGTPRVALRITVSHPQDVPRIRERIRRVEGVDLILEHDILFVRRRLIDRGIKPLTWLRLEVEERDGRALLRGVEQLEEEPPELRVAAVAIAVYNPKGAPRSSKDEIIMISVATSDGVEKVLTWREVQGLEQVEVLQDEKEMLLRFAELIKEGDYDVIVGYNTDSFDFPYIRDRLKKLGISLPLGRLDAELEVSRRGALPEARIRGRAHVDLYPIVRRHVKLNSYDLESVVEELLGIKKEKLDGERLFTYWDEGGEKRALLARYALEDARVTLALAEKFLPLYCELSTIVGQSLNDVARMTSGQLVEWLLMRYATPRGELIPNHPAGEEYAARARATYAGGYVREPKRGLVEHIAVFDFRSFGPSIIVSHNIDPSTLIVGNCEENRAPELEYCFSLEREGFIPAILKELIRRRAEIKRELKRSEGDRRRTLSFAEKALKILANSFYGYMGYPRARWYRRECAESVAAFARMYIKQVMRIAEEEFKLEVVYGDTDSLFVVIPPEKRELAQKFLQKVNESMPGIIELEFEGFYRRGLFVTKKRYALLSEDGKMVVKGLEFVRRDWAPIARETQKEVLRILLEEADPEKAARLVRDVIERIRQRRVSLEDITIYTQLTKRIKSYKSLEPHVVAAQKLKERGREVAPGMIIGYIITKGTKGISQRATPVEFARLEDYDPEYYIDNQILPAIQRIFEAIGYTRDYLKEGITQTSLSRWR

SEQ ID NO: 2671 - protein, 792 aa, unidentified
  REGION 1..792: note = Description of Unknown: Synthetic polypeptide
MPRILKGFLIDADFETVEGRALIRLFLRGEEGSFVVYDDSFSPYFYALPGDEPERVKERILASGAAEAIQKVEIEEKRLFGTPRVALRITVSHPQDVPRIRERIRRVEGVDLILEHDILFVRRYLIDRGIKPLTWLRLEVEERDGRALLRGVEQLEEEPPELRVAAVAIAVYNPKGAPRSSKDEIIMISVATSDGVEKVLTWREVQGLEQVEVLQDEKEMLLRFAELIKEGDYDVIVGYNTDSFDFPYIRDRLKKLGISLPLGRLDAELEVSRRGALPEARIRGRAHVDLYPIVRRHVKLNSYDLESVVEELLGIKKEKLDGERLFTYWDEGGEKRALLARYALEDARVTLALAEKFLPLYCELSTIVGQSLNDVARMTSGQLVEWLLMRYATPRGELIPNHPAGEEYAARARATYAGGYVREPKRGLVEHIAVFDFRSFGPSIIVSHNIDPSTLIVGNCEENRAPELEYCFSLEREGFIPAILKELIRRRAEIKRELKRSEGDRRRTLSFAEKALKILANSFYGYMGYPRARWYRRECAESVAAFARMYIKQVMRIAEEEFKLEVVYGDTDSLFVVIPPEKRELAQKFLQKVNESMPGIIELEFEGFYRRGLFVTKKRYALLSEDGKMVVKGLEFVRRDWAPIARETQKEVLRILLEEADPEIAARLVRDVIERIRQRRVSLEDITIYTQLTKRIKSYKSLEPHVVAAQKLKERGREVAPGMIIGYIITKGTKGISQRATPVEFARLEDYDPEYYIDNQILPAIQRIFEAIGYTRDYLKEGITQTSLSRWF

SEQ ID NO: 2672 - protein, 792 aa, unidentified
  REGION 1..792: note = Description of Unknown: Synthetic polypeptide
MPRILKGFLIDADFETVEGRALIRLFLRGEEGSFVVYDDSFSPYFYALPGDEPERVKERILASGAAEAIQKVEIEEKRLFGTPRVALRITVSHPQDVPRIRERIRRVEGVDLILEHDILFVRRYLIDRGIKPLTWLRLEVEERDGRALLRGVEQLEEEPPELRVAAVAIAVYNPKGAPRSSKDEIIMISVATSDGVEKVLTWREVQGLEQVEVLQDEKEMLLRFAELIKEGDYDVIVGYNTDSFDFPYIRDRLKKLGISLPLGRLDAELEVSRRGALPEARIRGRAHVDLYPIVRRHVKLNSYDLESVVEELLGIKKEKLDGERLFTYWDEGGEKRALLARYALEDARVTLALAEKFLPLYCELSTIVGQSLNDVARMTSGQLVEWLLMRYATPRGELIPNHPAGEEYAARARATYAGGYVREPKRGLVEHIAVFDFRSFGPSIIVSHNIDPSTLIVGNCEENRAPELEYCFSLEREGFIPAILKELIRRRAEIKRELKRSEGDRRRTLSFAEKALKILANSFYGYMGYPRARWYRRECAESVAAFARMYIKQVMRIAEEEFKLEVVYGDTDSLFVVIPPEKRELAQKFLQKVNESMPGIIELEFEGFYRRGLFVTKKRYALLSEDGKMVVKGLEFVRRDWAPIARETQKEVLRILLEEADPEQAARLVRDVIERIRQRRVSLEDITIYTQLTKRIKSYKSLEPHVVAAQKLKERGREVAPGMIIGYIITKGTKGISQRATPVEFARLEDYDPEYYIDNQILPAIQRIFEAIGYTRDYLKEGITQTSLSRWF

SEQ ID NO: 2673 - protein, 792 aa, unidentified
  REGION 1..792: note = Description of Unknown: Synthetic polypeptide
MPRILKGFLIDADFETVEGRALIRLFLRGEEGSFVVYDDSFSPYFYALPGDEPERVKERILASGAAEAIQKVEIEEKRLFGTPRVALRITVSHPQDVPRIRERIRRVEGVDLILEHDILFVRRYLIDRGIKPLTWLRLEVEERDGRALLRGVEQLEEEPPELRVAAVAIAVYNPKGAPRSSKDEIIMISVATSDGVEKVLTWREVQGLEQVEVLQDEKEMLLRFAELIKEGDYDVIVGYNTDSFDFPYIRDRLKKLGISLPLGRLDAELEVSRRGALPEARIRGRAHVDLYPIVRRHVKLNSYGLESVVEELLGIKKEKLDGERLFTYWDEGGEKRALLARYALEDARVTLALAEKFLPLYCELSTIVGQSLNDVARMTSGQLVEWLLMRYATPRGELIPNHPAGEEYAARARATYAGGYVREPKRGLVEHIAVFDFRSFGPSIIVSHNIDPSTLIVGNCEENRAPELEYCFSLEREGFIPAILKELIRRRAEIKRELKRSEGDRRRTLSFAEKALKILANSFYGYMGYPRARWYRRECAESVAAFARMYIKQVMRIAEEEFKLEVVYGDTDSLFVVIPPEKRELAQKFLQKVNESMPGIIELEFEGFYRRGLFVTKKRYALLSEDGKMVVKGLEFVRRDWAPIARETQKEVLRILLEEADPEKAARLVRDVIERIRQRRVSLEDITIYTQLTKRIKSYKSLEPHVVAAQKLKERGREVAPGMIIGYIITKGTKGISQRATPVEFARLEDYDPEYYIDNQILPAIQRIFEAIGYTRDYLKEGITQTSLSRWF

SEQ ID NO: 2674 - protein, 781 aa, unidentified
  REGION 1..781: note = Description of Unknown: Synthetic polypeptide
MPRILKGFLIDADFETVEGRALIRLFLRGEEGSFVVYDDSFSPYFYALPGDEPERVKERILASGAAEAIQKVEIEEKRLFGTPRVALRITVSHPQDVPRIRERIRRVEGVDLILEHDILFVRRYLIDRGIKPLTWLRLEVEERDGRALLRGVEQLEEEPPELRVAAVAIAVYNPKGAPRSSKDEIIMISVATSDGVEKVLTWREVQGLEQVEVLQDEKEMLLRFAELIKEGDYDVIVGYNTDSFDFPYIRDRLKKLGISLPLGRLDAELEVSRRGALPEARIRGRAHVDLYPIVRRHVKLNSYVLESVVEELLGIKKEKLDGERLFTYWDEGGEKRALLARYALEDARVTLALAEKFLPLYCELSTIVGQSLNDVARMTSGQLVEWLLMRYATPRGELIPNHPAGEEYAARARATYAGGYVREPKRGLVEHIAVFDFRSFGPSIIVSHNIDPSTLIVGNCEENRAPELEYCFSLEREGFIPAILKELIRRRAEIKRELKRSEGDRRRTLSFAEKALKILANSFYGYMGYPRARWYRRECAESVAAFARMYIKQVMRIAEEEFKLEVVYGDTDSLFVVIPPEKRELAQKFLQKVNESMPGIIELEFEGFYRRGLFVTKKRYALLSEDGKMVVKGLEFVRRDWAPIARETQKEVLRILLEEADPEKAARLVRDVIERIRQRRVSLEDITIYTQLTKRIKSYKSLEPHVVAAQKLKERGREVAPGMIIGYIITKGTKGISQRATPVEFARLEDYDPEYYIDNQILPAIQRIFEAIGYTRDYLKE

SEQ ID NO: 2675 - protein, 792 aa, unidentified
  REGION 1..792: note = Description of Unknown: Synthetic polypeptide
MPRILKGFLIDADFETVEGRALIRLFLRGEEGSFVVYDDSFSPYFYALPGDEPERVKERILASGAAEAIQKVEIEEKRLFGTPRVALRITVSHPQDVPRIRERIRRVEGVDLILEHDILFVRRRLIDRGIKPLTWLRLEVEERDGRALLRGVEQLEEEPPELRVAAVAIAVYNPKGAPRSSKDEIIMISVATSDGVEKVLTWREVQGLEQVEVLQDEKEMLLRFAELIKEGDYDVIVGYNTDSFDFPYIRDRLKKLGISLPLGRLDAELEVSRRGALPEARIRGRAHVDLYPIVRRHVKLNSYDLESVVEELLGIKKEKLDGERLFTYWDEGGEKRALLARYALEDARVTLALAEKFLPLYCELSTIVGQSLNDVARMTSGQLVEWLLMRYATPRGELIPNHPAGEEYAARARATYAGGYVREPKRGLVEHIAVFDFRSFGPSIIVSHNIDPSTLIVGNCEENRAPELEYCFSLEREGFIPAILKELIRRRAEIKRELKRSEGDRRRTLSFAEKALKILANSFYGCMGYPRARWYRRECAESVAAFARMYIKQVMRIAEEEFKLEVVYGDTDSLFVVIPPEKRELAQKFLQKVNESMPGIIELEFEGFYRRGLFVTKKRYALLSEDGKMVVKGLEFVRRDWAPIARETQKEVLRILLEEADPEKAARLVRDVIERIRQRRVSLEDITIYTQLTKRIKSYKSLEPHVVAAQKLKERGREVAPGMIIGYIITKGTKGISQRATPVEFARLEDYDPEYYIDNQILPAIQRIFEAIGYTRDYLKEGITQTSLSRWF

SEQ ID NO: 2676 - protein, 792 aa, unidentified
  REGION 1..792: note = Description of Unknown: Synthetic polypeptide
MPRILKGFLIDADFETVEGRALIRLFLRGEEGSFVVYDDSFSPYFYALPGDEPERVKERILASGAAEAIQKVEIEEKRLFGTPRVALRITVSHPQDVPRIRERIRRVEGVDLILEHDILFVRRRLIDRGIKPLTWLRLEVEERDGRALLRGVEQLEEEPPELRVAAVAIAVYNPKGAPRSSKDEIIMISVATSDGVEKVLTWREVQGLEQVEVLQDEKEMLLRFAELIKEGDYDVIVGYNTDSFDFPYIRDRLKKLGISLPLGRLDAELEVSRRGALPEARIRGRAHVDLYPIVRRHVKLNSYDLESVVEELLGIKKEKLDGERLFTYWDEGGEKRALLARYALEDARVTLALAEKFLPLYCELSTIVGQSLNDVARMTSGQLVEWLLMRYATPRGELIPNHPAGEEYAARARATYAGGYVREPKRGLVEHIAVFDFRSFGPSIIVSHNIDPSTLIVGNCEENRAPELEYCFSLEREGFIPAILKELIRRRAEIKRELKRSEGDRRRTLSFAEKALKILANSFYGYMGYPRARWYRRECAESVAAFARMYIKQVMRIAEEEFKLEVVYGDTDSLFVVIPPEKRELAQKFLQKVNESLPGIIELEFEGFYRRGLFVTKKRYALLSEDGKMVVKGLEFVRRDWAPIARETQKEVLRILLEEADPEKAARLVRDVIERIRQRRVSLEDITIYTQLTKRIKSYKSLEPHVVAAQKLKERGREVAPGMIIGYIITKGTKGISQRATPVEFARLEDYDPEYYIDNQILPAIQRIFEAIGYTRDYLKEGITQTSLSRWF

SEQ ID NO: 2677 - protein, 792 aa, unidentified
  REGION 1..792: note = Description of Unknown: Synthetic polypeptide
MPRILKGFLIDADFETVEGRALIRLFLRGEEGSFVVYDDSFSPYFYALPGDEPERVKERILASGAAEAIQKVEIEEKRLFGTPRVALRITVSHPQDVPRIRERIRRVEGVDLILEHDILFVRRYLIDRGIKPLTWLRLEVEERDGRALLRGVEQLEEEPPELRVAAVAIAVYNPKGAPRSSKDEIIMISVATSDGVEKVLTWREVQGLEQVEVLQDEKEMLLRFAELIKEGDYDVIVGYNTDSFDFPYIRDRLKKLGISLPLGRLDAELEVSRRGALPEARIRGRAHVDLYPIVRRHVKLNSYDLESVVEELLGIKKEKLDGERLFTYWDEGGEKRALLARYALEDARVTLALAEKFLPLYCELSTIVGQSLNDVARMTSGQLVEWLLMRYATPRGELIPNHPAGEEYAARARATYAGGYVREPKRGLVEHIAVFDFRSFGPSIIVSHNIDPSTLIVGNCEENRAPELEYCFSLEREGFIPAILKELIRRRAEIKRELKRSEGDRRRTLSFAEKALKILANSFYGYMGYPRARWYRRECADSVAAFARMYIKQVMRIAEEEFKLEVVYGDTDSLFVVIPPEKRELAQKFLQKVNESMPGIIELEFEGFYRRGLFVTKKRYALLSEDGKMVVKGLEFVRRDWAPIARETQKEVLRILLEEADPEKAARLVRDVIERIRQRRVSLEDITIYTQLTKRIKSYKSLEPHVVAAQKLKERGREVAPGMIIGYIITKGTKGISQRATPVEFARLEDYDPEYYIDNQILPAIQRIFEAIGYTRDYLKEGITQTSLSRWF

SEQ ID NO: 2678 - protein, 792 aa, unidentified
  REGION 1..792: note = Description of Unknown: Synthetic polypeptide
MPRILKGFLIDADFETVEGRALIRLFLRGEEGSFVVYDDSFSPYFYALPGDEPERVKERILASGAAEAIQKVEIEEKRLFGTPRVALRITVSHPQDVPRIRERIRRVEGVDLILEHDILFVRRRLIDRGIKPLTWLRLEVEERDGRALLRGVEQLEEEPPELRVAAVAIAVYNPKGAPRSSKDEIIMISVATSDGVEKVLTWREVQGLEQVEVLQDEKEMLLRFAELIKEGDYDVIVGYNTDSFDFPYIRDRLKKLGISLPLGRLDAELEVSRRGALPEARIRGRIHVDLYPIVRRHVKLNSYDLESVVEELLGIKKEKLDGERLFTYWDEGGEKRALLARYALEDARVTLALAEKFLPLYCELSTIVGQSLNDVARMTSGQLVEWLLMRYATPRGELIPNHPAGEEYAARARATYAGGYVREPKRGLVEHIAVFDFRSFGPSIIVSHNIDPSTLIVGNCEENRAPELEYCFSLEREGFIPAILKELIRRRAEIKRELKRSEGDRRRTLSFAEKALKILANSFYGYMGYPRARWYRRECAESVAAFARMYIKQVMRIAEEEFKLEVVYGDTDSLFVVIPPEKRELAQKFLQKVNESMPGIIELEFEGFYRRGLFVTKKRYALLSEDGKMVVKGLEFVRRDWAPIARETQKEVLRILLEEADPEKAARLVRDVIERIRQRRVSLEDITIYTQLTKRIKSYKSLEPHVVAAQKLKERGREVAPGMIIGYIITKGTKGISQRATPVEFARLEDYDPEYYIDNQILPAIQRIFEAIGYTRDYLKEGITQTSLSRWF

SEQ ID NO: 2679 - protein, 775 aa, unidentified
  REGION 1..775: note = Description of Unknown: Synthetic polypeptide
MPRILKGFLIDADFETVEGRALIRLFLRGEEGSFVVYDDSFSPYFYALPGDEPERVKERILASGAAEAIQKVEIEEKRLFGTPRVALRITVSHPQDVPRIRERIRRVEGVDLILEHDILFVRRYLIDRGIKPLTWEQLEEEPPELRVAAVAIAVYNPKGAPRSSKDEIIMISVATSDGVEKVLTWREVQGLEQVEVLQDEKEMLLRFAELIKEGDYDVIVGYNTDSFDFPYIRDRLKKLGISLPLGRLDAELEVSRRGALPEARIRGRAHVDLYPIVRRHVKLNSYDLESVVEELLGIKKEKLDGERLFTYWDEGGEKRALLARYALEDARVTLALAEKFLPLYCELSTIVGQSLNDVARMTSGQLVEWLLMRYATPRGELIPNHPAGEEYAARARATYAGGYVREPKRGLVEHIAVFDFRSFGPSIIVSHNIDPSTLIVGNCEENRAPELEYCFSLEREGFIPAILKELIRRRAEIKRELKRSEGDRRRTLSFAEKALKILANSFYGYMGYPRARWYRRECAESVAAFARMYIKQVMRIAEEEFKLEVVYGDTDSLFVVIPPEKRELAQKFLQKVNESMPGIIELEFEGFYRRGLFVTKKRYALLSEDGKMVVKGLEFVRRDWAPIARETQKEVLRILLEEADPEKAARLVRDVIERIRQRRVSLEDITIYTQLTKRIKSYKSLEPHVVAAQKLKERGREVAPGMIIGYIITKGTKGISQRATPVEFARLEDYDPEYYIDNQILPAIQRIFEAIGYTRDYLKEGITQTSLSRWF

SEQ ID NO: 2680 - protein, 792 aa, unidentified
  REGION 1..792: note = Description of Unknown: Synthetic polypeptide
MPRILKGFLIDADFETVEGRALIRLFLRGEEGSFVVYDDSFSPYFYALPGDEPERVKERILASGAAEAIQKVEIEEKRLFGTPRVALRITVSHPQDVPRIRERIRRVEGVDLILEHDILFVRRRLIDRGIKPLTWLRLEVEERDGRALLRGVEQLEEEPPELRVAAVAIAVYNPKGAPRSSKDEIIMISVATSDGVEKVLTWREVQGLEQVEVLQDEKEMLLRFAELIKEGDYDVIVGYNTDSFDFPYIRDRLKKLGISLPLGRLDAELEVSRRGALPEARIRGRAHVDLYPIVRRHVKLNSYDLESVVEELLGIKKEKLDGERLFTYWDEGGEKRALLARYALEDARVTLALAEKFLPLYCELSTIVGQSLNDVARMTSGQLVEWLLMMYATPRGELIPNHPAGEEYAARARATYAGGYVREPKRGLVEHIAVFDFRSFGPSIIVSHNIDPSTLIVGNCEENRAPELEYCFSLEREGFIPAILKELIRRRAEIKRELKRSEGDRRRTLSFAEKALKILANSFYGYMGYPRARWYRRECAESVAAFARMYIKQVMRIAEEEFKLEVVYGDTDSLFVVIPPEKRELAQKFLQKVNESMPGIIELEFEGFYRRGLFVTKKRYALLSEDGKMVVKGLEFVRRDWAPIARETQKEVLRILLEEADPEKAARLVRDVIERIRQRRVSLEDITIYTQLTKRIKSYKSLEPHVVAAQKLKERGREVAPGMIIGYIITKGTKGISQRATPVEFARLEDYDPEYYIDNQILPAIQRIFEAIGYTRDYLKEGITQTSLSRWF

SEQ ID NO: 2681 - protein, 792 aa, unidentified
  REGION 1..792: note = Description of Unknown: Synthetic polypeptide
MPRILKGFLIDADFETVEGRALIRLFLRGEEGSFVVYDDSFSPYFYALPGDEPERVKERILASGAAEAIQKVEIEEKRLFGTPRVALRITVSHPQDVPRIRERIRRVEGVDLILEHDILFVRRRLIDRGIKPLTWLRLEVEERDGRALLRGVEQLEEEPPELRVAAVAIAVYNPKGAPRSSKDEIIMISVATSDGVEKVLTWREVQGLEQVEVLQDEKEMLLRFAELIKEGDYDVIVGYNTDSFDFPYIRDRLKKLGISLPLGRLDAELEVSRRGALPEARIRGRAHVDLYPIVRRHVKLNSYDLESVVEELLGIKKEKLDGERLFTYWDEGGEKRALLARYALEDARVTLALAEKFLPLYCELSTIVGQSLNDVARMTSGQLVEWLLMRYATPRGELIPNHPAGEEYAARARATYAGGYVREPKRGLVEHIAVFDFRSFGPSIIVSHNIDPSTLIVGNCEENRAPELEYCFSLEREGFIPAILKELIRRRAEIKRELKRSEGDRRRTLSFAEKALKILANSFYGYMGYPRARWYRRECAESVAAFARMYIKQVMRIAEEEFKLEVVYGDTDSLFVVIPPEKRELAQKFLQKVNESMPGIIELEFEGFYRRGLFVTKKRYALLSEDGKMVVKGLEFVRRDWAPIARETQKEVLRILLEEADPEKAARLVRDVIERIRQRRVSLEDITIYTQLTKRIKSYKSLEPHVVVAQKLKERGREVAPGMIIGYIITKGTKGISQRATPVEFARLEDYDPEYYIDNQILPAIQRIFEAIGYTRDYLKEGITQTSLSRWF

SEQ ID NO: 2682 - protein, 792 aa, unidentified
  REGION 1..792: note = Description of Unknown: Synthetic polypeptide
MPRILKGFLIDADFETVEGRALIRLFLRGEEGSFVVYDDSFSPYFYALPGDEPERVKERILASGAAEAIQKVEIEEKRLFGTPRVALRITVSHPQDVPRIRERIRRVEGVDLILEHDILFVRRYLIDRGIKPLTWLRLEVEERDGRALLRGVEQLEEEPPELRVAAVAIAVYNPKGAPRSSKDEIIMISVATSDGVEKVLTWREVQGLEQVEVLQDEKEMLLRFAELIKEGDYDVIVGYNTDSFDFPYIRDRLKKLGISLPLGRLDAELEVSRRGALPEARIRGRAHVDLYPIVRRHVKLNSYDLESVVEELLGIKKEKLDGERLFTYWDEGGEKRALLARYALEDARVTLALAEKFLPLYCELSTIVGQSLNDVARMTSGQLVEWLLMRYATPRGELIPNHPAGEEYAARARATYAGGYVREPKRGLVEHIAVFDFRSFGPSIIVSHNIDPSTLIVGNCEENRAPELEYCFSLEREGFIPAILKELIRRRAEIKRELKRSEGDRRRTLSFAEKALKILANSFYGYMGYPRARWYRRECAVSVAAFARMYIKQVMRIAEEEFKLEVVYGDTDSLFVVIPPEKRELAQKFLQKVNESMPGIIELEFEGFYRRGLFVTKKRYALLSEDGKMVVKGLEFVRRDWAPIARETQKEVLRILLEEADPEKAARLVRDVIERIRQRRVSLEDITIYTQLTKRIKSYKSLEPHVVAAQKLKERGREVAPGMIIGYIITKGTKGISQRATPVEFARLEDYDPEYYIDNQILPAIQRIFEAIGYTRDYLKEGITQTSLSRWF

SEQ ID NO: 2683 - protein, 792 aa, unidentified
  REGION 1..792: note = Description of Unknown: Synthetic polypeptide
MPRILKGFLIDADFETVEGRALIRLFLRGEEGSFVVYDDSFSPYFYALPGDEPERVKERILASGAAEAIQKVEIEEKRLFGTPRVALRITVSHPQDVPRIRERIRRVEGVDLILEHDILFVRRRLIDRGIKPLTWLRLEVEERDGRALLRGVEQLEEEPPELRVAAVAIAVYNPKGAPRSSKDEIIMISVATSDGVEKVLTWREVQGLEQVEVLQDEKEMLLRFAELIKEGDYDVIVGYNTDSFDFPYIRDRLKKLGISLPLGRLDAELEVSRRGALPEARIRGRAHVDLYPIVRRHVKLNSYDLESVVEELLGIKKEKLDGERLFTYWDEGGEKRALLARYALEDARVTLALAEKFLPLYCELSTIVGQSLNDVARMTSGQLVEWLLMRYATPRGELIPNHPAGEEYAARARATYAGGYVREPKRGLVEHIAVFDFRSFGPSIIVSHNIDPSTLIVGNCEENRAPELEYCFSLEREGFIPAILKELIRRRAEIKRELKRSEGDRRRTLSFAEKALKILANSFYGYMGYPRARWYRRECAESVAAFARMYIKQVMRIAEEEFKLEVVYGDTDSLFVTIPPEKRELAQKFLQKVNESMPGIIELEFEGFYRRGLFVTKKRYALLSEDGKMVVKGLEFVRRDWAPIARETQKEVLRILLEEADPEKAARLVRDVIERIRQRRVSLEDITIYTQLTKRIKSYKSLEPHVVAAQKLKERGREVAPGMIIGYIITKGTKGISQRATPVEFARLEDYDPEYYIDNQILPAIQRIFEAIGYTRDYLKEGITQTSLSRWF

SEQ ID NO: 2684 - protein, 792 aa, unidentified
  REGION 1..792: note = Description of Unknown: Synthetic polypeptide
MPRILKGFLIDADFETVEGRALIRLFLRGEEGSFVVYDDSFSPYFYALPGDEPERVKERILASGAAEAIQKVEIEEKRLFGTPRVALRITVSHPQDVPRIRERIRRVEGVDLILEHDILFVRRRLIDRGIKPLTWLRLEVEERDGRALLRGVEQLEEEPPELRVAAVAIAVYNPKGAPRSSKDEIIMISVATSDGVEKVLTWREVQGLEQVEVLQDEKEMLLRFAELIKEGDYDVIVGYNTDSFDFPYIRDRLKKLGISLPLGRLDAELEVSRRGALPEARIRGRAHVDLYPIVRRHVKLNSYDLESVVEELLGIKKEKLDGERLFTYWDEGGEKRALLARYALEDARVTLALAEKFLPLYCELSTIVGQSLNDVARMTSGQLVEWLLMRYATPRGELIPNHPAGEEYAARARATYAGGYVREPKRGLVEHIAVFDFRSFGPSIIVSHNIDPSTLIVGNCEENRAPELEYCFSLEREGFIPAILKELIRRRAEIKRELKRSEGDRRRTLSFAEKALKILANSFYGYMGYPRARWYRRECAESVAAFARMYIKQVMRIAEEEFKLEVVYGDTDSLFVVIPPEKRELAQKFLQKVNESMPGIIELEFEGFYRRGLFVTKKRYALLSEDGKMVVKGLEFVRRDWSPIARETQKEVLRILLEEADPEKAARLVRDVIERIRQRRVSLEDITIYTQLTKRIKSYKSLEPHVVAAQKLKERGREVAPGMIIGYIITKGTKGISQRATPVEFARLEDYDPEYYIDNQILPAIQRIFEAIGYTRDYLKEGITQTSLSRWF

SEQ ID NO: 2685 - protein, 792 aa, unidentified
  REGION 1..792: note = Description of Unknown: Synthetic polypeptide
MPRILKGFLIDADFETVEGRALIRLFLRGEEGSFVVYDDSFSPYFYALPGDEPERVKERILASGAAEAIQKVEIEEKRLFGTPRVALRITVSHPQDVPRIRERIRRVEGVDLILEHDILFVRRYLIDRGIKPLTWLRLEVEERDGRALLRGVEQLEEEPPELRVAAVAIAVYNPKGAPRSSKDEIIMISVATSDGVEKVLTWREVQGLEQVEVLQDEKEMLLRFAELIKEGDYDVIVGYNTDSFDFPYIRDRLKKLGISLPLGRLDAELEVSRRGALPEARIRGRAHVDLYPIVRRHVKLNSYVLESVVEELLGIKKEKLDGERLFTYWDEGGEKRALLARYALEDARVTLALAEKFLPLYCELSTIVGQSLNDVARMTSGQLVEWLLMRYATPRGELIPNHPAGEEYAARARATYAGGYVREPKRGLVEHIAVFDFRSLYPSIIVSHNIDPSTLIVGNCEENRAPELEYCFSLEREGFIPAILKELIRRRAEIKRELKRSEGDRRRTLSFAEKRLKILANSFYGYMGYPRARWYRRECAESVAAFARMYIKQVMRIAEEEFKLEVVYGDTDSLFVVIPPEKRELAQKFLQKVNESMPGIIELEFEGFYRRGLFVTKKRYALLSEDGKMVVKGLEFVRRDWAPIARETQKEVLRILLEEADPEKAARLVRDVIERIRQRRVSLEDITIYTQLTKRIKSYKSLEPHVVAAQKLKERGREVAPGMIIGYIITKGTKGISQRATPVEFARLEDYDPEYYIDNQILPAIQRIFEAIGYTRDYLKEGITQTSLSRWF

SEQ ID NO: 2686 - protein, 792 aa, unidentified
  REGION 1..792: note = Description of Unknown: Synthetic polypeptide
MPRILKGFLIDADFETVEGRALIRLFLRGEEGSFVVYDDSFSPYFYALPGDEPERVKERILASGAAEAIQKVEIEEKRLFGTPRVALRITVSHPQDVPRIRERIRRVEGVDLILEHDILFVRRYLIDRGIKPLTWLRLEVEERDGRALLRGVEQLEEEPPELRVAAVAIAVYNPKGAPRSSKDEIIMISVATSDGVEKVLTWREVQGLEQVEVLQDEKEMLLRFAELIKEGDYDVIVGYNTDSFDFPYIRDRLKKLGISLPLGRLDAELEVSRRGALPEARIRGRAHVDLYPIVRRHVKLNSYDLESVVEELLGIKKEKLDGERLFTYWDEGGEKRALLARYALEDARVTLALAEKFLPLYCELSTIVGQSLNDVARMTSGQLVEWLLMRYATPRGELIPNHPAGEEYAARARATYAGGYVREPKRGLVEHIAVFDFRSFGPSIIVSHNIDPSTLIVGNCEENRAPELEYCFSLEREGFIPAILKELIRRRAEIKRELKRSEGDRRRTLSFAEKALKILANSFYGYMGYPRARWYRRECAQSVAAFARMYIKQVMRIAEEEFKLEVVYGDTDSLFVVIPPEKRELAQKFLQKVNESMPGIIELEFEGFYRRGLFVTKKRYALLSEDGKMVVKGLEFVRRDWAPIARETQKEVLRILLEEADPEKAARLVRDVIERIRQRRVSLEDITIYTQLTKRIKSYKSLEPHVVAAQKLKERGREVAPGMIIGYIITKGTKGISQRATPVEFARLEDYDPEYYIDNQILPAIQRIFEAIGYTRDYLKEGITQTSLSRWF

SEQ ID NO: 2687 - protein, 792 aa, unidentified
  REGION 1..792: note = Description of Unknown: Synthetic polypeptide
MPRILKGFLIDADFETVEGRALIRLFLRGEEGSFVVYDDSFSPYFYALPGDEPERVKERILASGAAEAIQKVEIEEKRLFGTPRVALRITVSHPQDVPRIRERIRRVEGVDLILEHDILFVRRRLIDRGIKPLTWLRLEVEERDGRALLRGVEQLEEEPPELRVAAVAIAVYNPKGAPRSSKDEIIMISVATSDGVEKVLTWREVQGLEQVEVLQDEKEMLLRFAELIKEGDYDVIVGYNTDSFDFPYIRDRLKKLGISLPLGRLDAELEVSRRGALPEARIRGRAHVDLYPIVRRHVKLNSYDLESVVEELLGIKKEKLDGERLTTYWDEGGEKRALLARYALEDARVTLALAEKFLPLYCELSTIVGQSLNDVARMTSGQLVEWLLMRYATPRGELIPNHPAGEEYAARARATYAGGYVREPKRGLVEHIAVFDFRSFGPSIIVSHNIDPSTLIVGNCEENRAPELEYCFSLEREGFIPAILKELIRRRAEIKRELKRSEGDRRRTLSFAEKALKILANSFYGYMGYPRARWYRRECAESVAAFARMYIKQVMRIAEEEFKLEVVYGDTDSLFVVIPPEKRELAQKFLQKVNESMPGIIELEFEGFYRRGLFVTKKRYALLSEDGKMVVKGLEFVRRDWAPIARETQKEVLRILLEEADPEKAARLVRDVIERIRQRRVSLEDITIYTQLTKRIKSYKSLEPHVVAAQKLKERGREVAPGMIIGYIITKGTKGISQRATPVEFARLEDYDPEYYIDNQILPAIQRIFEAIGYTRDYLKEGITQTSLSRWF

SEQ ID NO: 2688 - protein, 792 aa, unidentified
  REGION 1..792: note = Description of Unknown: Synthetic polypeptide
MPRILKGFLIDADFETVEGRALIRLFLRGEEGSFVVYDDSFSPYFYALPGDEPERVKERILASGAAEAIQKVEIEEKRLFGTPRVALRITVSHPQDVPRIRERIRRVEGVDLILEHDILFVRRRLIDRGIKPLTWLRLEVEERDGRALLRGVEQLNEEPPELRVAAVAIAVYNPKGAPRSSKDEIIMISVATSDGVEKVLTWREVQGLEQVEVLQDEKEMLLRFAELIKEGDYDVIVGYNTDSFDFPYIRDRLKKLGISLPLGRLDAELEVSRRGALPEARIRGRAHVDLYPIVRRHVKLNSYDLESVVEELLGIKKEKLDGERLFTYWDEGGEKRALLARYALEDARVTLALAEKFLPLYCELSTIVGQSLNDVARMTSGQLVEWLLMRYATPRGELIPNHPAGEEYAARARATYAGGYVREPKRGLVEHIAVFDFRSFGPSIIVSHNIDPSTLIVGNCEENRAPELEYCFSLEREGFIPAILKELIRRRAEIKRELKRSEGDRRRTLSFAEKALKILANSFYGYMGYPRARWYRRECAESVAAFARMYIKQVMRIAEEEFKLEVVYGDTDSLFVVIPPEKRELAQKFLQKVNESMPGIIELEFEGFYRRGLFVTKKRYALLSEDGKMVVKGLEFVRRDWAPIARETQKEVLRILLEEADPEKAARLVRDVIERIRQRRVSLEDITIYTQLTKRIKSYKSLEPHVVAAQKLKERGREVAPGMIIGYIITKGTKGISQRATPVEFARLEDYDPEYYIDNQILPAIQRIFEAIGYTRDYLKEGITQTSLSRWF

SEQ ID NO: 2689 - protein, 792 aa, unidentified
  REGION 1..792: note = Description of Unknown: Synthetic polypeptide
MPRILKGFLIDADFETVEGRALIRLFLRGEEGSFVVYDDSFSPYFYALPGDEPERVKERILASGAAEAIQKVEIEEKRLFGTPRVALRITVSHPQDVPRIRERIRRVEGVDLILEHDILFVRRRLIDRGIKPLTWLRLEVEERDGRALLRGVEQLEEEPPELRVAAVAIAVYNPKGAPRSSKDEIIMISVATSDGVEKVLTWREVQGLEQVEVLQDEKEMLLRFAELIKEGDYDVIVGYNTDSFDFPYIRDRLKKLGISLPLGRLDAELEVSRRGALPEARIRGRAHVDLYPIVRRHVKLNSYDLESVVEELLGIKKEKLFGERLFTYWDEGGEKRALLARYALEDARVTLALAEKFLPLYCELSTIVGQSLNDVARMTSGQLVEWLLMRYATPRGELIPNHPAGEEYAARARATYAGGYVREPKRGLVEHIAVFDFRSFGPSIIVSHNIDPSTLIVGNCEENRAPELEYCFSLEREGFIPAILKELIRRRAEIKRELKRSEGDRRRTLSFAEKALKILANSFYGYMGYPRARWYRRECAESVAAFARMYIKQVMRIAEEEFKLEVVYGDTDSLFVVIPPEKRELAQKFLQKVNESMPGIIELEFEGFYRRGLFVTKKRYALLSEDGKMVVKGLEFVRRDWAPIARETQKEVLRILLEEADPEKAARLVRDVIERIRQRRVSLEDITIYTQLTKRIKSYKSLEPHVVAAQKLKERGREVAPGMIIGYIITKGTKGISQRATPVEFARLEDYDPEYYIDNQILPAIQRIFEAIGYTRDYLKEGITQTSLSRWF

SEQ ID NO: 2690 - protein, 792 aa, unidentified
  REGION 1..792: note = Description of Unknown: Synthetic polypeptide
MPRILKGFLIDADFETVEGRALIRLFLRGEEGSFVVYDDSFSPYFYALPGDEPERVKERILASGAAEAIQKVEIEEKRLFGTPRVALRITVSHPQDVPRIRERIRRVEGVDLILEHDILFVRRYLIDRGIKPLTWLRLEVEERDGRALLRGVEQLEEEPPELRVAAVAIAVYNPKGAPRSSKDEIIMISVATSDGVEKVLTWREVQGLEQVEVLQDEKEMLLRFAELIKEGDYDVIVGYNTDSFDFPYIRDRLKKLGISLPLGRLDAELEVSRRGALPEARIRGRAHVDLYPIVRRHVKLNSYDLESVVEELLGIKKEKLDGERLFTYWDEGGEKRALLARYALEDARVTLALAEKFLPLYCELSTIVGQSLNDVARMTSGQLVEWLLMRYATPRGELIPNHPAGEEYAARARATYAGGYVREPKRGLVEHIAVFDFRSFGPSIIVSHNIDPSTLIVGNCEENRAPELEYCFSLEREGFIPAILKELIRRRAEIKRELKRSEGDRRRTLSFAEKALKILANSFYGYMGYPRARWYRRECAASVAAFARMYIKQVMRIAEEEFKLEVVYGDTDSLFVVIPPEKRELAQKFLQKVNESMPGIIELEFEGFYRRGLFVTKKRYALLSEDGKMVVKGLEFVRRDWAPIARETQKEVLRILLEEADPEKAARLVRDVIERIRQRRVSLEDITIYTQLTKRIKSYKSLEPHVVAAQKLKERGREVAPGMIIGYIITKGTKGISQRATPVEFARLEDYDPEYYIDNQILPAIQRIFEAIGYTRDYLKEGITQTSLSRWF

SEQ ID NO: 2691 - protein, 792 aa, unidentified
  REGION 1..792: note = Description of Unknown: Synthetic polypeptide
MPRILKGFLIDADFETVEGRALIRLFLRGEEGSFVVYDDSFSPYFYALPGDEPERVKERILASGAAEAIQKVEIEEKRLFGTPRVALRITVSHPQDVPRIRERIRRVEGVDLILEHDILFVRRYLIDRGIKPLTWLRLEVEERDGRALLRGVEQLEEEPPELRVAAVAIAVYNPKGAPRSSKDEIIMISVATSDGVEKVLTWREVQGLEQVEVLQDEKEMLLRFAELIKEGDYDVIVGYNTDSFDFPYIRDRLKKLGISLPLGRLDAELEVSRRGALPEARIRGRAHVDLYPIVRRHVKLNSYDLESVVEELLGIKKEKLDGERLFTYWDEGGEKRALLARYALEDARVTLALAEKFLPLYCELSTIVGQSLNDVARMTSGQLVEWLLMRYATPRGELIPNHPAGEEYAARARATYAGGYVREPKRGLVEHIAVFDFRSFGPSIIVSHNIDPSTLIVGNCEENRAPELEYCFSLEREGFIPAILKELIRRRAEIKRELKRSEGDRRRTLSFAEKALKILANSFYGYMGYPRARWYRRECASSVAAFARMYIKQVMRIAEEEFKLEVVYGDTDSLFVVIPPEKRELAQKFLQKVNESMPGIIELEFEGFYRRGLFVTKKRYALLSEDGKMVVKGLEFVRRDWAPIARETQKEVLRILLEEADPEKAARLVRDVIERIRQRRVSLEDITIYTQLTKRIKSYKSLEPHVVAAQKLKERGREVAPGMIIGYIITKGTKGISQRATPVEFARLEDYDPEYYIDNQILPAIQRIFEAIGYTRDYLKEGITQTSLSRWF

SEQ ID NO: 2692 - protein, 792 aa, unidentified
  REGION 1..792: note = Description of Unknown: Synthetic polypeptide
MPRILKGFLIDADFETVEGRALIRLFLRGEEGSFVVYDDSFSPYFYALPGDEPERVKERILASGAAEAIQKVEIEEKRLFGTPRVALRITVSHPQDVPRIRERIRRVEGVDLILEHDILFVRRYLIDRGIKPLTWLRLEVEERDGRALLRGVEQLEEEPPELRVAAVAIAVYNPKGAPRSSKDEIIMISVATSDGVEKVLTWREVQGLEQVEVLQDEKEMLLRFAELIKEGDYDVIVGYNTDSFDFPYIRDRLKKLGISLPLGRLDAELEVSRRGALPEARIRGRAHVDLYPIVRRHVKLNSYVLESVVEELLGIKKEKLDGERLFTYWDEGGEKRALLARYALEDARVTLALAEKFLPLYCELSTIVGQSLNDVARMTSGQLVEWLLMRYATPRGELIPNHPAGEEYAARARATYAGGYVREPKRGLVEHIAVFDFRSIGPSIIVSHNIDPSTLIVGNCEENRAPELEYCFSLEREGFIPAILKELIRRRAEIKRELKRSEGDRRRTLSFAEKRLKILANSFYGYMGYPRARWYRRECAESVAAFARMYIKQVMRIAEEEFKLEVVYGDTDSLFVVIPPEKRELAQKFLQKVNESMPGIIELEFEGFYRRGLFVTKKRYALLSEDGKMVVKGLEFVRRDWAPIARETQKEVLRILLEEADPEKAARLVRDVIERIRQRRVSLEDITIYTQLTKRIKSYKSLEPHVVAAQKLKERGREVAPGMIIGYIITKGTKGISQRATPVEFARLEDYDPEYYIDNQILPAIQRIFEAIGYTRDYLKEGITQTSLSRWF

SEQ ID NO: 2693 - protein, 792 aa, unidentified
  REGION 1..792: note = Description of Unknown: Synthetic polypeptide
MPRILKGFLIDADFETVEGRALIRLFLRGEEGSFVVYDDSFSPYFYALPGDEPERVKERILASGAAEAIQKVEIEEKRLFGTPRVALRITVSHPQDVPRIRERIRRVNGVDLILEHDILFVRRRLIDRGIKPLTWLRLEVEERDGRALLRGVEQLEEEPPELRVAAVAIAVYNPKGAPRSSKDEIIMISVATSDGVEKVLTWREVQGLEQVEVLQDEKEMLLRFAELIKEGDYDVIVGYNTDSFDFPYIRDRLKKLGISLPLGRLDAELEVSRRGALPEARIRGRAHVDLYPIVRRHVKLNSYDLESVVEELLGIKKEKLDGERLFTYWDEGGEKRALLARYALEDARVTLALAEKFLPLYCELSTIVGQSLNDVARMTSGQLVEWLLMRYATPRGELIPNHPAGEEYAARARATYAGGYVREPKRGLVEHIAVFDFRSFGPSIIVSHNIDPSTLIVGNCEENRAPELEYCFSLEREGFIPAILKELIRRRAEIKRELKRSEGDRRRTLSFAEKALKILANSFYGYMGYPRARWYRRECAESVAAFARMYIKQVMRIAEEEFKLEVVYGDTDSLFVVIPPEKRELAQKFLQKVNESMPGIIELEFEGFYRRGLFVTKKRYALLSEDGKMVVKGLEFVRRDWAPIARETQKEVLRILLEEADPEKAARLVRDVIERIRQRRVSLEDITIYTQLTKRIKSYKSLEPHVVAAQKLKERGREVAPGMIIGYIITKGTKGISQRATPVEFARLEDYDPEYYIDNQILPAIQRIFEAIGYTRDYLKEGITQTSLSRWF

SEQ ID NO: 2694 - protein, 792 aa, unidentified
  REGION 1..792: note = Description of Unknown: Synthetic polypeptide
MPRILKGFLIDADFETVEGRALIRLFLRGEEGSFVVYDDSFSPYFYALPGDEPERVKERILASGAAEAIQKVEIEEKRLFGTPRVALRITVSHPQDVPRIRERIRRVEGVDLILEHDILFVRRYLIDRGIKPLTWLRLEVEERDGRALLRGVEQLEEEPPELRVAAVAIAVYNPKGAPRSSKDEIIMISVATSDGVEKVLTWREVQGLEQVEVLQDEKEMLLRFAELIKEGDYDVIVGYNTDSFDFPYIRDRLKKLGISLPLGRLDAELEVSRRGALPEARIRGRAHVDLYPIVRRHVKLNSYLLESVVEELLGIKKEKLDGERLFTYWDEGGEKRALLARYALEDARVTLALAEKFLPLYCELSTIVGQSLNDVARMTSGQLVEWLLMRYATPRGELIPNHPAGEEYAARARATYAGGYVREPKRGLVEHIAVFDFRSFGPSIIVSHNIDPSTLIVGNCEENRAPELEYCFSLEREGFIPAILKELIRRRAEIKRELKRSEGDRRRTLSFAEKALKILANSFYGYMGYPRARWYRRECAESVAAFARMYIKQVMRIAEEEFKLEVVYGDTDSLFVVIPPEKRELAQKFLQKVNESMPGIIELEFEGFYRRGLFVTKKRYALLSEDGKMVVKGLEFVRRDWAPIARETQKEVLRILLEEADPEKAARLVRDVIERIRQRRVSLEDITIYTQLTKRIKSYKSLEPHVVAAQKLKERGREVAPGMIIGYIITKGTKGISQRATPVEFARLEDYDPEYYIDNQILPAIQRIFEAIGYTRDYLKEGITQTSLSRWF

SEQ ID NO: 2695 - protein, 792 aa, unidentified; identical to SEQ ID NO: 1978
  REGION 1..792: note = Description of Unknown: Synthetic polypeptide

SEQ ID NO: 2696 - protein, 792 aa, unidentified
  REGION 1..792: note = Description of Unknown: Synthetic polypeptide
MPRILKGFLIDADFETVEGRALIRLFLRGEEGSFVVYDDSFSPYFYALPGDEPERVKERILASGAAEAIQKVEIEEKRLFGTPRVALRITVSHPQDVPRIRERIRRVEGVDLILEHDILFVRRRLIDRGIKPLTWLRLEVEERDGRALLRGVEQLEEEPPELRVAAVAIAVYNPKGAPRSSKDEIIMISVATSDGVEKVLTWREVQGLEQVEVLQDEKEMLLRFAELIKEGDYDVIVGYNTDSFDFPYIRDRLKKLGISLPLGRLDAELEVSRRGALPEARIRGRAHVDLYPIVRRHVKLNSYDLESVVEELLGIKKEKLDGERLFTYWDEGGEKRALLARYALEDARVTLALAEKFLPLYCELSTIVGQSLNDVARMTSGQLVEWLLVRYATPRGELIPNHPAGEEYAARARATYAGGYVREPKRGLVEHIAVFDFRSFGPSIIVSHNIDPSTLIVGNCEENRAPELEYCFSLEREGFIPAILKELIRRRAEIKRELKRSEGDRRRTLSFAEKALKILANSFYGYMGYPRARWYRRECAESVAAFARMYIKQVMRIAEEEFKLEVVYGDTDSLFVVIPPEKRELAQKFLQKVNESMPGIIELEFEGFYRRGLFVTKKRYALLSEDGKMVVKGLEFVRRDWAPIARETQKEVLRILLEEADPEKAARLVRDVIERIRQRRVSLEDITIYTQLTKRIKSYKSLEPHVVAAQKLKERGREVAPGMIIGYIITKGTKGISQRATPVEFARLEDYDPEYYIDNQILPAIQRIFEAIGYTRDYLKEGITQTSLSRWF

SEQ ID NO: 2697 - protein, 792 aa, unidentified
  REGION 1..792: note = Description of Unknown: Synthetic polypeptide
MPRILKGFLIDADFETVEGRALIRLFLRGEEGSFVVYDDSFSPYFYALPGDEPERVKERILASGAAEAIQKVEIEEKRLFGTPRVALRITVSHPQDVPRIRERIRRVEGVDLILEHDILFVRRYLIDRGIKPLTWLRLEVEERDGRALLRGVEQLEEEPPELRVAAVAIAVYNPKGAPRSSKDEIIMISVATSDGVEKVLTWREVQGLEQVEVLQDEKEMLLRFAELIKEGDYDVIVGYNTDSFDFPYIRDRLKKLGISLPLGRLDAELEVSRRGALPEARIRGRAHVDLYPIVRRHVKLNSYSLESVVEELLGIKKEKLDGERLFTYWDEGGEKRALLARYALEDARVTLALAEKFLPLYCELSTIVGQSLNDVARMTSGQLVEWLLMRYATPRGELIPNHPAGEEYAARARATYAGGYVREPKRGLVEHIAVFDFRSFGPSIIVSHNIDPSTLIVGNCEENRAPELEYCFSLEREGFIPAILKELIRRRAEIKRELKRSEGDRRRTLSFAEKALKILANSFYGYMGYPRARWYRRECAESVAAFARMYIKQVMRIAEEEFKLEVVYGDTDSLFVVIPPEKRELAQKFLQKVNESMPGIIELEFEGFYRRGLFVTKKRYALLSEDGKMVVKGLEFVRRDWAPIARETQKEVLRILLEEADPEKAARLVRDVIERIRQRRVSLEDITIYTQLTKRIKSYKSLEPHVVAAQKLKERGREVAPGMIIGYIITKGTKGISQRATPVEFARLEDYDPEYYIDNQILPAIQRIFEAIGYTRDYLKEGITQTSLSRWF

SEQ ID NO: 2698 - protein, 792 aa, unidentified
  REGION 1..792: note = Description of Unknown: Synthetic polypeptide
MPRILKGFLIDADFETVEGRALIRLFLRGEEGSFVVYDDSFSPYFYALPGDEPERVKERILASGAAEAIQKVEIEEKRLFGTPRVALRITVSHPQDVPRIRERIRRVEGVDLILEHDILFVRRRLIDRGIKPLTWLRLEVEERDGRALLRGVEQLEEEPPELRVAAVAIAVYNPKGAPRSSKDEIIMISVATSDGVEKVLTWREVQGLEQVEVLQDEKEMLLRFAELIEEGDYDVIVGYNTDSFDFPYIRDRLKKLGISLPLGRLDAELEVSRRGALPEARIRGRAHVDLYPIVRRHVKLNSYDLESVVEELLGIKKEKLDGERLFTYWDEGGEKRALLARYALEDARVTLALAEKFLPLYCELSTIVGQSLNDVARMTSGQLVEWLLMRYATPRGELIPNHPAGEEYAARARATYAGGYVREPKRGLVEHIAVFDFRSFGPSIIVSHNIDPSTLIVGNCEENRAPELEYCFSLEREGFIPAILKELIRRRAEIKRELKRSEGDRRRTLSFAEKALKILANSFYGYMGYPRARWYRRECAESVAAFARMYIKQVMRIAEEEFKLEVVYGDTDSLFVVIPPEKRELAQKFLQKVNESMPGIIELEFEGFYRRGLFVTKKRYALLSEDGKMVVKGLEFVRRDWAPIARETQKEVLRILLEEADPEKAARLVRDVIERIRQRRVSLEDITIYTQLTKRIKSYKSLEPHVVAAQKLKERGREVAPGMIIGYIITKGTKGISQRATPVEFARLEDYDPEYYIDNQILPAIQRIFEAIGYTRDYLKEGITQTSLSRWF

SEQ ID NO: 2699 - protein, 792 aa, unidentified
  REGION 1..792: note = Description of Unknown: Synthetic polypeptide
MPRILKGFLIDADFETVEGRALIRLFLRGEEGSFVVYDDSFSPYFYALPGDEPERVKERILASGAAEAIQKVEIEEKRLFGTPRVALRITVSHPQDVPRIRERIRRVEGVDLILEHDILFVRRRLIDRGIKPLTWLRLEVEERDGRALLRGVEQLEEEPPELRVAAVAIAVYNPKGAPRSSKDEIIMISVATSDGVEKVLTWREVQGLEQVEVLQDEKEMLLRFAELIKEGDYDVIVGYNTDSFDFPYIRDRLKKLGISLPLGRLDAELEVSRRGALPEARIRGRAHVDLYPIVRRHVKLNSYDLESVVEELLGIKKEKLDGERLFTYWDEGGEKRALLARYALEDARVTLALAEKFLPLYCELSTIVGQSLNDVARMTSGQLVEWLLMRYATPRGELIPNHPAGEEYAARARATYAGGYVREPKRGLVEHIAVFDFRSFGPSIIVSHNIDPSTLIVGNCEENRAPELEYCFSLEREGFIPAILKELIRRRAEIKRELKRSEGDRRRTLSFAEKALKILANSFYGYMGYPRARWYRRECAESVAAFARMYIKQVMRIAEEEFKLEVVYGDTDSLFVVIPPEKRELAQKFLQKVNESMPGIIELEFEGFYRRGLFVTKKRYALLSEDGKMVVKGLEFVRRDWAPIARETQKEVLRILLEEADPEKAARLVRDVIERIRQRRVSLEDITIYTQLTKRIKSYKSLEPHVVAAQKLKERGREVAPGMIIGYIITKGTKGISQRATPVEFARLEDYDPEYYIDNQVLPAIQRIFEAIGYTRDYLKEGITQTSLSRWF

SEQ ID NO: 2700 - protein, 792 aa, unidentified
  REGION 1..792: note = Description of Unknown: Synthetic polypeptide
MPRILKGFLIDADFETVEGRALIRLFLRGEEGSFVVYDDSFSPYFYALPGDEPERVKERILASGAAEAIQKVEIEEKRLFGTPRVALRITVSHPQDVPRIRERIRRVEGVDLILEHDILFVRRYLIDRGIKPLTWLRLEVEERDGRALLRGVEQLEEEPPELRVAAVAIAVYNPKGAPRSSKDEIIMISVATSDGVEKVLTWREVQGLEQVEVLQDEKEMLLRFAELIKEGDYDVIVGYNTDSFDFPYIRDRLKKLGISLPLGRLDAELEVSRRGALPEARIRGRAHVDLYPIVRRHVKLNSYALESVVEELLGIKKEKLDGERLFTYWDEGGEKRALLARYALEDARVTLALAEKFLPLYCELSTIVGQSLNDVARMTSGQLVEWLLMRYATPRGELIPNHPAGEEYAARARATYAGGYVREPKRGLVEHIAVFDFRSFGPSIIVSHNIDPSTLIVGNCEENRAPELEYCFSLEREGFIPAILKELIRRRAEIKRELKRSEGDRRRTLSFAEKALKILANSFYGYMGYPRARWYRRECAESVAAFARMYIKQVMRIAEEEFKLEVVYGDTDSLFVVIPPEKRELAQKFLQKVNESMPGIIELEFEGFYRRGLFVTKKRYALLSEDGKMVVKGLEFVRRDWAPIARETQKEVLRILLEEADPEKAARLVRDVIERIRQRRVSLEDITIYTQLTKRIKSYKSLEPHVVAAQKLKERGREVAPGMIIGYIITKGTKGISQRATPVEFARLEDYDPEYYIDNQILPAIQRIFEAIGYTRDYLKEGITQTSLSRWF

SEQ ID NO: 2701 - protein, 792 aa, unidentified
  REGION 1..792: note = Description of Unknown: Synthetic polypeptide
MPRILKGFLIDADFETVEGRALIRLFLRGEEGSFVVYDDSYSPYFYALPGDEPERVKERILASGAAEAIQKVEIEEKRLFGTPRVALRITVSHPQDVPRIRERIRRVEGVDLILEHDILFVRRRLIDRGIKPLTWLRLEVEERDGRALLRGVEQLEEEPPELRVAAVAIAVYNPKGAPRSSKDEIIMISVATSDGVEKVLTWREVQGLEQVEVLQDEKEMLLRFAELIKEGDYDVIVGYNTDSFDFPYIRDRLKKLGISLPLGRLDAELEVSRRGALPEARIRGRAHVDLYPIVRRHVKLNSYDLESVVEELLGIKKEKLDGERLFTYWDEGGEKRALLARYALEDARVTLALAEKFLPLYCELSTIVGQSLNDVARMTSGQLVEWLLMRYATPRGELIPNHPAGEEYAARARATYAGGYVREPKRGLVEHIAVFDFRSFGPSIIVSHNIDPSTLIVGNCEENRAPELEYCFSLEREGFIPAILKELIRRRAEIKRELKRSEGDRRRTLSFAEKALKILANSFYGYMGYPRARWYRRECAESVAAFARMYIKQVMRIAEEEFKLEVVYGDTDSLFVVIPPEKRELAQKFLQKVNESMPGIIELEFEGFYRRGLFVTKKRYALLSEDGKMVVKGLEFVRRDWAPIARETQKEVLRILLEEADPEKAARLVRDVIERIRQRRVSLEDITIYTQLTKRIKSYKSLEPHVVAAQKLKERGREVAPGMIIGYIITKGTKGISQRATPVEFARLEDYDPEYYIDNQILPAIQRIFEAIGYTRDYLKEGITQTSLSRWF

SEQ ID NO: 2702 - protein, 792 aa, unidentified
  REGION 1..792: note = Description of Unknown: Synthetic polypeptide
MPRILKGFLIDADFETVEGRALIRLFLRGEEGSFVVYDDSFSPYFYALPGDEPERVKERILASGAAEAIQKVEIEEKRLFGTPRVALRITVSHPQDVPRIRERIRRVEGVDLILEHDILFVRRRLIDRGIKPLTWLRLEVEERDGRALLRGVEQLEEEPPELRVAAVAIAVYNPKGAPRSSKDEIIMISVATSDGVEKVLTWREVQGLEQVEVLQDEKEMLLRFAELIKEGDYDVIVGYNTDSFDFPYIRDRLKKLGISLPLGRLDAELEVSRRGALPEARIRGRAHVDLYPIVRRHVKLNSYDLESVVEELLGIKKEKLDGERLFTYWDEGGEKRALLARYALEDARVTLALAEKFLPLYCELSTIVGQSLNDVARMTSGQLVEWFLMRYATPRGELIPNHPAGEEYAARARATYAGGYVREPKRGLVEHIAVFDFRSFGPSIIVSHNIDPSTLIVGNCEENRAPELEYCFSLEREGFIPAILKELIRRRAEIKRELKRSEGDRRRTLSFAEKALKILANSFYGYMGYPRARWYRRECAESVAAFARMYIKQVMRIAEEEFKLEVVYGDTDSLFVVIPPEKRELAQKFLQKVNESMPGIIELEFEGFYRRGLFVTKKRYALLSEDGKMVVKGLEFVRRDWAPIARETQKEVLRILLEEADPEKAARLVRDVIERIRQRRVSLEDITIYTQLTKRIKSYKSLEPHVVAAQKLKERGREVAPGMIIGYIITKGTKGISQRATPVEFARLEDYDPEYYIDNQILPAIQRIFEAIGYTRDYLKEGITQTSLSRWF

SEQ ID NO: 2703 - protein, 792 aa, unidentified
  REGION 1..792: note = Description of Unknown: Synthetic polypeptide
MPRILKGFLIDADFETVEGRALIRLFLRGEEGSFVVYDDSFSPYFYALPGDEPERVKERILASGAAEAIQKVEIEEKRLFGTPRVALRITVSHPQDVPRIRERIRRVEGVDLILEHDILFVRRRLIDRGIKPLTWLRLEVEERDGRALLRGVEQLEEEPPELRVAAVAIAVYNPKGAPRSSKDEIIMISVATSDGVEKVLTWREVQGLEQVEVLQDEKEMLLRFAELIKEGDYDVIVGYNTDSFDFPYIRDRLKKLGISLPLGRLDAELEVSRRGALPEARIRGRAHVDLYPIVRRHVKLNSYDLESVVEELLGIKKEKLDGERLFTYWDEGGEKRALLARYALEDARVTLALAEKFLPLYCELSTIVGQSLNDVARMTSGQLVEWLLMRYATPRGELIPNHPAGEEYAARARATYAGGYVREPKRGLVEHIAVFDFRSFGPSIIVSHNIDPSTLIVGNCEENRAPELEYCFSLEREGFIPAILKELIRRRAEIKRELKRSEGDRRRTLSFAEKALKILANSFYGYMGYPRARWYRRECAESVAAFARMYIKQVMRIAEEEFKLEVVYGDTDSLFVVIPPEKRELAQKFLQKVNESMPGIIELEFEGFYRRGLFVTKKRYALLSEDGKMVVKGLEFVRRDWAPIARETQKEVLRILLEEADPEKAARLVRDVIERIRQRRVPLEDITIYTQLTKRIKSYKSLEPHVVAAQKLKERGREVAPGMIIGYIITKGTKGISQRATPVEFARLEDYDPEYYIDNQILPAIQRIFEAIGYTRDYLKEGITQTSLSRWF

SEQ ID NO: 2704 - protein, 792 aa, unidentified
  REGION 1..792: note = Description of Unknown: Synthetic polypeptide
MPRILKGFLIDADFETVEGRALIRLFLRGEEGSFVVYDDSFSPYFYALPGDEPERVKERILASGAAEAIQKVEIEEKRLFGTPRVALRITVSHPQDVPRIRERIRRVEGVDLILEHDILFVRRYLIDRGIKPLTWLRLEVEERDGRALLRGVEQLEEEPPELRVAAVAIAVYNPKGAPRSSKDEIIMISVATSDGVEKVLTWREVQGLEQVEVLQDEKEMLLRFAELIKEGDYDVIVGYNTDSFDFPYIRDRLKKLGISLPLGRLDAELEVSRRGALPEARIRGRAHVDLYPIVRRHVKLNSYVLESVVEELLGIKKEKLDGERLFTYWDEGGEKRALLARYALEDARVTLALAEKFLPLYCELSTIVGQSLNDVARMTSGQLVEWLLMRYATPRGELIPNHPAGEEYAARARATYAGGYVREPKRGLVEHIAVFDFRSFGPSIIVSHNIDPSTLIVGNCEENRAPELEYCFSLEREGFIPAILKELIRRRAEIKRELKRSEGDRRRTLSFAEKALKILANSFYGYMGYPRARWYRRECAESVAAFARMYIKQVMRIAEEEFKLEVVYGDTDSLFVVIPPEKRELAQKFLQKVNESMPGIIELEFEGFYRRGLFVTKKRYALLSEDGKMVVKKLEFVRRRWAPIARETQKEVLRILLEEADPEKAARLVRDVIERIRQRRVSLEDITIYTQLTKRIKSYKRLEPHVVAAQKLKERGREVAPGMIIGYIITKGTKGISQRATPVEFARLEDYDPEYYIDNQILPAIQRIFEAIGYTRDYLKEGITQTSLSRWF

SEQ ID NO: 2705 - protein, 792 aa, unidentified
  REGION 1..792: note = Description of Unknown: Synthetic polypeptide
MPRILKGFLIDADFETVEGRALIRLFLRGEEGSFVVYDDSFSPYFYALPGDEPERVKERILASGAAEAIQKVEIEEKRLFGTPRVALRITVSHPQDVPRIRERIRRVEGVDLILEHDILFVRRRLIDRGIKPLTWLRLEVEERDGRALLRGVEQLEEEPPELRMAAVAIAVYNPKGAPRSSKDEIIMISVATSDGVEKVLTWREVQGLEQVEVLQDEKEMLLRFAELIKEGDYDVIVGYNTDSFDFPYIRDRLKKLGISLPLGRLDAELEVSRRGALPEARIRGRAHVDLYPIVRRHVKLNSYDLESVVEELLGIKKEKLDGERLFTYWDEGGEKRALLARYALEDARVTLALAEKFLPLYCELSTIVGQSLNDVARMTSGQLVEWLLMRYATPRGELIPNHPAGEEYAARARATYAGGYVREPKRGLVEHIAVFDFRSFGPSIIVSHNIDPSTLIVGNCEENRAPELEYCFSLEREGFIPAILKELIRRRAEIKRELKRSEGDRRRTLSFAEKALKILANSFYGYMGYPRARWYRRECAESVAAFARMYIKQVMRIAEEEFKLEVVYGDTDSLFVVIPPEKRELAQKFLQKVNESMPGIIELEFEGFYRRGLFVTKKRYALLSEDGKMVVKGLEFVRRDWAPIARETQKEVLRILLEEADPEKAARLVRDVIERIRQRRVSLEDITIYTQLTKRIKSYKSLEPHVVAAQKLKERGREVAPGMIIGYIITKGTKGISQRATPVEFARLEDYDPEYYIDNQILPAIQRIFEAIGYTRDYLKEGITQTSLSRWF

SEQ ID NO: 2706 - protein, 792 aa, unidentified
  REGION 1..792: note = Description of Unknown: Synthetic polypeptide
MPRILKGFLIDADFETVEGRALIRLFLRGEEGSFVVYDDSFSPYFYALPGDEPERVKERILASGAAEAIQKVEIEEKRLFGTPRVALRITVSHPQDVPRIRERIRRVEGVDLILEHDILFVRRYLIDRGIKPLTWLRLEVEERDGRALLRGVEQLEEEPPELRVAAVAIAVYNPKGAPRSSKDEIIMISVATSDGVEKVLTWREVQGLEQVEVLQDEKEMLLRFAELIKEGDYDVIVGYNTDSFDFPYIRDRLKKLGISLPLGRLDAELEVSRRGALPEARIRGRAHVDLYPIVRRHVKLNSYKLESVVEELLGIKKEKLDGERLFTYWDEGGEKRALLARYALEDARVTLALAEKFLPLYCELSTIVGQSLNDVARMTSGQLVEWLLMRYATPRGELIPNHPAGEEYAARARATYAGGYVREPKRGLVEHIAVFDFRSFGPSIIVSHNIDPSTLIVGNCEENRAPELEYCFSLEREGFIPAILKELIRRRAEIKRELKRSEGDRRRTLSFAEKALKILANSFYGYMGYPRARWYRRECAESVAAFARMYIKQVMRIAEEEFKLEVVYGDTDSLFVVIPPEKRELAQKFLQKVNESMPGIIELEFEGFYRRGLFVTKKRYALLSEDGKMVVKGLEFVRRDWAPIARETQKEVLRILLEEADPEKAARLVRDVIERIRQRRVSLEDITIYTQLTKRIKSYKSLEPHVVAAQKLKERGREVAPGMIIGYIITKGTKGISQRATPVEFARLEDYDPEYYIDNQILPAIQRIFEAIGYTRDYLKEGITQTSLSRWF

SEQ ID NO: 2707 - protein, 792 aa, unidentified
  REGION 1..792: note = Description of Unknown: Synthetic polypeptide
MPRILKGFLIDADDETVEGRALIRLFLRGEEGSFVVYDDSFSPYFYALPGDEPERVKERILASGAAEAIQKVEIEEKRLFGTPRVALRITVSHPQDVPRIRERIRRVEGVDLILEHDILFVRRRLIDRGIKPLTWLRLEVEERDGRALLRGVEQLEEEPPELRVAAVAIAVYNPKGAPRSSKDEIIMISVATSDGVEKVLTWREVQGLEQVEVLQDEKEMLLRFAELIKEGDYDVIVGYNTDSFDFPYIRDRLKKLGISLPLGRLDAELEVSRRGALPEARIRGRAHVDLYPIVRRHVKLNSYDLESVVEELLGIKKEKLDGERLFTYWDEGGEKRALLARYALEDARVTLALAEKFLPLYCELSTIVGQSLNDVARMTSGQLVEWLLMRYATPRGELIPNHPAGEEYAARARATYAGGYVREPKRGLVEHIAVFDFRSFGPSIIVSHNIDPSTLIVGNCEENRAPELEYCFSLEREGFIPAILKELIRRRAEIKRELKRSEGDRRRTLSFAEKALKILANSFYGYMGYPRARWYRRECAESVAAFARMYIKQVMRIAEEEFKLEVVYGDTDSLFVVIPPEKRELAQKFLQKVNESMPGIIELEFEGFYRRGLFVTKKRYALLSEDGKMVVKGLEFVRRDWAPIARETQKEVLRILLEEADPEKAARLVRDVIERIRQRRVSLEDITIYTQLTKRIKSYKSLEPHVVAAQKLKERGREVAPGMIIGYIITKGTKGISQRATPVEFARLEDYDPEYYIDNQILPAIQRIFEAIGYTRDYLKEGITQTSLSRWF

SEQ ID NO: 2708 - protein, 792 aa, unidentified
  REGION 1..792: note = Description of Unknown: Synthetic polypeptide
MPRILKGFLIDADYETVEGRALIRLFLRGEEGSFVVYDDSFSPYFYALPGDEPERVKERILASGAAEAIQKVEIEEKRLFGTPRVALRITVSHPQDVPRIRERIRRVEGVDLILEHDILFVRRYLIDRGIKPLTWLRLEVEERDGRALLRGVEQLEEEPPELRVAAVDIAVYNPKGAPRSSKDEIIMISVATSDGVEKVLTWREVQGLEQVEVLQDEKEMLLRFAELIKEGDYDVIVGYNTDSFDFPYIRDRLKKLGISLPLGRLDAELEVSRRGALPEARIRGRAHVDLYPIVRRHVKLNSYVLESVVEELLGIKKEKLDGERLFTYWDEGGEKRALLARYALEDARVTLALAEKFLPLYCELSTIVGQSLNDVARMTSGQLVEWLLMRYATPRGELIPNHPAGEEYAARARATYAGGYVREPKRGLVEHIAVFDFRSLYPSIIVSHNIDPSTLIVGNCEENRAPELEYCFSLEREGFIPAILKELIRRRAEIKRELKRSEGDRRRTLSFAEKALKILANSFYGYMGYPRARWYRRECAESVAAFARMYIKQVMRIAEEEFKLEVVYGDTDSLFVVIPPEKRELAQKFLQKVNESMPGIIELEFEGFYRRGLFVTKKRYALLSEDGKMVVKGLEFVRRDWAPIARETQKEVLRILLEEADPEKAARLVRDVIERIRQRRVSLEDITIYTQLTKRIKSYKSLEPHVVAAQKLKERGREVAPGMIIGYIITKGTKGISQRATPVEFARLEDYDPEYYIDNQILPAIQRIFEAIGYTRDYLKEGITQTSLSRWF

SEQ ID NO: 2709 - protein, 792 aa, unidentified
  REGION 1..792: note = Description of Unknown: Synthetic polypeptide
MPRILKGFLIDADFETVEGRALIRLFLRGEEGSFVVYDDSFSPYFYALPGDEPERVKERILASGAAEAIQKVEIEEKRLLGTPRVALRITVSHPQDVPRIRERIRRVEGVDLILEHDILFVRRRLIDRGIKPLTWLRLEVEERDGRALLRGVEQLEEEPPELRVAAVAIAVYNPKGAPRSSKDEIIMISVATSDGVEKVLTWREVQGLEQVEVLQDEKEMLLRFAELIKEGDYDVIVGYNTDSFDFPYIRDRLKKLGISLPLGRLDAELEVSRRGALPEARIRGRAHVDLYPIVRRHVKLNSYDLESVVEELLGIKKEKLDGERLFTYWDEGGEKRALLARYALEDARVTLALAEKFLPLYCELSTIVGQSLNDVARMTSGQLVEWLLMRYATPRGELIPNHPAGEEYAARARATYAGGYVREPKRGLVEHIAVFDFRSFGPSIIVSHNIDPSTLIVGNCEENRAPELEYCFSLEREGFIPAILKELIRRRAEIKRELKRSEGDRRRTLSFAEKALKILANSFYGYMGYPRARWYRRECAESVAAFARMYIKQVMRIAEEEFKLEVVYGDTDSLFVVIPPEKRELAQKFLQKVNESMPGIIELEFEGFYRRGLFVTKKRYALLSEDGKMVVKGLEFVRRDWAPIARETQKEVLRILLEEADPEKAARLVRDVIERIRQRRVSLEDITIYTQLTKRIKSYKSLEPHVVAAQKLKERGREVAPGMIIGYIITKGTKGISQRATPVEFARLEDYDPEYYIDNQILPAIQRIFEAIGYTRDYLKEGITQTSLSRWF

SEQ ID NO: 2710 - protein, 792 aa, unidentified
  REGION 1..792: note = Description of Unknown: Synthetic polypeptide
MPRILKGFLIDADFETVEGRALIRLFLRGEEGSFVVYDDSFSPYFYALPGDEPERVKERILASGAAEAIQKVEIEEKRLFGTPRVALRITVSHPQDVPRIRERIRRVEGVDLILEHDILFVRRRLIDRGIKPLTGLRLEVEERDGRALLRGVEQLEEEPPELRVAAVAIAVYNPKGAPRSSKDEIIMISVATSDGVEKVLTWREVQGLEQVEVLQDEKEMLLRFAELIKEGDYDVIVGYNTDSFDFPYIRDRLKKLGISLPLGRLDAELEVSRRGALPEARIRGRAHVDLYPIVRRHVKLNSYDLESVVEELLGIKKEKLDGERLFTYWDEGGEKRALLARYALEDARVTLALAEKFLPLYCELSTIVGQSLNDVARMTSGQLVEWLLMRYATPRGELIPNHPAGEEYAARARATYAGGYVREPKRGLVEHIAVFDFRSFGPSIIVSHNIDPSTLIVGNCEENRAPELEYCFSLEREGFIPAILKELIRRRAEIKRELKRSEGDRRRTLSFAEKALKILANSFYGYMGYPRARWYRRECAESVAAFARMYIKQVMRIAEEEFKLEVVYGDTDSLFVVIPPEKRELAQKFLQKVNESMPGIIELEFEGFYRRGLFVTKKRYALLSEDGKMVVKGLEFVRRDWAPIARETQKEVLRILLEEADPEKAARLVRDVIERIRQRRVSLEDITIYTQLTKRIKSYKSLEPHVVAAQKLKERGREVAPGMIIGYIITKGTKGISQRATPVEFARLEDYDPEYYIDNQILPAIQRIFEAIGYTRDYLKEGITQTSLSRWF

SEQ ID NO: 2711 - protein, 792 aa, unidentified
  REGION 1..792: note = Description of Unknown: Synthetic polypeptide
MPRILKGFLIDADFETVEGRALIRLFLRGEEGSFVVYDDSFSPYFYADPGDEPERVKERILASGAAEAIQKVEIEEKRLFGTPRVALRITVSHPQDVPRIRERIRRVEGVDLILEHDILFVRRRLIDRGIKPLTWLRLEVEERDGRALLRGVEQLEEEPPELHVAAVAIAVYNPKGAPRSSKDEIIMISVATSDGVEKVLTWREVQGLEQVEVLQDEKEMLLRFAELIKEGDYDVIVGYNTDSFDFPYIRDRLKKLGISLPLGRLDAELEVSRRGALPEARIRGRAHVDLYPIVRRHVKLNSYDLESVVEELLGIKKEKLDGERLFTYWDEGGEKRALLARYALEDARVTLALAEKFLPLYCELSTIVGQSLNDVARMTSGQLVEWLLMRYATPRGELIPNHPAGEEYAARARATYAGGYVREPKRGLVEHIAVFDFRSFGPSIIVSHNIDPSTLIVGNCEENRAPELEYCFSLEREGFIPAILKELIRRRAEIKRELKRSEGDRRRTLSFAEKALKILANSFYGYMGYPRARWYRRECAESVAAFARMYIKQVMRIAEEEFKLEVVYGDTDSLFVVIPPEKRELAQKFLQKVNESMPGIIELEFEGFYRRGLFVTKKRYALLSEDGKMVVKGLEFVRRDWAPIARETQKEVLRILLEEADPEKAARLVRDVIERIRQRRVSLEDITIYTQLTKRIKSYKSLEPHVVAAQKLKERGREVAPGMIIGYIITKGTKGISQRATPVEFARLEDYDPEYYIDNQILPAIQRIFEAIGYTRDYLKEGITQTSLSRWF

SEQ ID NO: 2712 - protein, 792 aa, unidentified
  REGION 1..792: note = Description of Unknown: Synthetic polypeptide
MPRILKGFLIDADFETVEGRALIRLFLRGEEGSFVVYDDSFSPYFYADPGDEPERVKERILASGAAEAIQKVEIEEKRLFGTPRVALRITVSHPQDVPRIRERIRRVEGVDLILEHDILFVRRRLIDRGIKPLTWLRLEVEERDGRALLRGVEQLEEEPPELRVAAVAIAVYNPKGAPRSSKDEIIMISVATSDGVEKVLTWREVQGLEQVEVLQDEKEMLLRFAELIKEGDYDVIVGYNTDSFDFPYIRDRLKKLGISLPLGRLDAELEVSRRGALPEARIRGRAHVDLYPIVRRHVKLNSYDLESVVEELLGIKKEKLDGERLFTYWDEGGEKRALLARYALEDARVTLALAEKFLPLYCELSTIVGQSLNDVARMTSGQLVEWLLMRYATPRGELIPNHPAGEEYAARARATYAGGYVREPKRGLVEHIAVFDFRSFGPSIIVSHNIDPSTLIVGNCEENRAPELEYCFSLEREGFIPAILKELIRRRAEIKRELKRSEGDRRRTLSFAEKALKILANSFYGYMGYPRARWYRRECAESVAAFARMYIKQVMRIAEEEFKLEVVYGDTDSLFVVIPPEKRELAQKFLQKANESMPGIIELEFEGFYRRGLFVTKKRYALLSEDGKMVVKGLEFVRRDWAPIARETQKEVLRILLEEADPEKAARLVRDVIERIRQRRVSLEDITIYTQLTKRIKSYKSLEPHVVAAQKLKERGREVAPGMIIGYIITKGTKGISQRATPVEFARLEDYDPEYYIDNQILPAIQRIFEAIGYTRDYLKEGITQTSLSRWF

SEQ ID NO: 2713 - protein, 792 aa, unidentified
  REGION 1..792: note = Description of Unknown: Synthetic polypeptide
MPRILKGFLIDADFETVEGRALIRLFLRGEEGSFVVYDDSFSPYFYALPGDEPERVKERILASGAAEAIQKVEIEEKRLFGTPRVALRITVSHPQDVPRIRERIRRVEGVDLILEHDILFVRRRLIDRGIKPLTWLRLEVEERDGRALLRGVEQLEEEPPELRVAAVAIAVYNPKGAPRSSKDEIIMISVATSDGVEKVLTWREVQGLEQVEVLQDEKEMLLRFARLIKEGDYDVIVGYNTDSFDFPYIRDRLKKLGISLPLGRLDAELEVSRRGALPEARIRGRAHVDLYPIVRRHVKLNSYDLESVVEELLGIKKEKLDGERLFTYWDEGGEKRALLARYALEDARVTLALAEKFLPLYCELSTIVGQSLNDVARMTSGQLVEWLLMRYATPRGELIPNHPAGEEYAARARATYAGGYVREPKRGLVEHIAVFDFRSFGPSIIVSHNIDPSTLIVGNCEENRAPELEYCFSLEREGFIPAILKELIRRRAEIKRELKRSEGDRRRTLSFAEKALKILANSFYGYMGYPRARWYRRECAESVAAFARMYIKQVMRIAEEEFKLEVVYGDTDSLFVVIPPEKRELAQKFLQKVNESMPGIIELEFEGFYRRGLFVTKKRYALLSEDGKMVVKGLEFVRRDWAPIARETQKEVLRILLEEADPEKAARLVRDVIERIRQRRVSLEDITIYTQLTKRIKSYKSLEPHVVAAQKLKERGREVAPGMIIGYIITKGTKGISQRATPVEFARLEDYDPEYYIDNQILPAIQRIFEAIGYTRDYLKEGITQTSLSRWF

SEQ ID NO: 2714 - protein, 792 aa, unidentified
  REGION 1..792: note = Description of Unknown: Synthetic polypeptide
MPRILKGFLIDADFETVEGRALIRLFLRGEEGSKVVYDDSFSPYFYALPGDEPERVKERILASGAAEAIQKVEIEEKRLFGTPRVALRITVSHPQDVPRIRERIRRVEGVDLILEHDILFVRRRLIDRGIKPLTWLRLEVEERDGRALLRGVEQLEEEPPELRVAAVAIAVYNPKGAPRSSKDEIIMISVATSDGVEKVLTWREVQGLEQVEVLQDEKEMLLRFAELIKEGDYDVIVGYNTDSFDFPYIRDRLKKLGISLPLGRLDAELEVSRRGALPEARIRGRAHVDLYPIVRRHVKLNSYDLESVVEELLGIKKEKLDGERLFTYWDEGGEKRALLARYALEDARVTLALAEKFLPLYCELSTIVGQSLNDVARMTSGQLVEWLLMRYATPRGELIPNHPAGEEYAARARATYAGGYVREPKRGLVEHIAVFDFRSFGPSIIVSHNIDPSTLIVGNCEENRAPELEYCFSLEREGFIPAILKELIRRRAEIKRELKRSEGDRRRTLSFAEKALKILANSFYGYMGYPRARWYRRECAESVAAFARMYIKQVMRIAEEEFKLEVVYGDTDSLFVVIPPEKRELAQKFLQKVNESMPGIIELEFEGFYRRGLFVTKKRYALLSEDGKMVVKGLEFVRRDWAPIARETQKEVLRILLEEADPEKAARLVRDVIERIRQRRVSLEDITIYTQLTKRIKSYKSLEPHVVAAQKLKERGREVAPGMIIGYIITKGTKGISQRATPVEFARLEDYDPEYYIDNQILPAIQRIFEAIGYTRDYLKEGITQTSLSRWF

SEQ ID NO: 2715 - protein, 792 aa, unidentified
  REGION 1..792: note = Description of Unknown: Synthetic polypeptide
MPRILKGFLIDADFETVEGKALIRLFLRGEEGSFVVYDDSFSPYFYALPGDEPERVKERILASGAAEAIQKVEIEEKRLFGTPRVALRITVSHPQDVPRIRERIRRVEGVDLILEHDILFVRRRLIDRGIKPLTWLRLEVEERDGRALLRGVEQLEEEPPELRVAAVAIAVYNPKGAPRSSKDEIIMISVATSDGVEKVLTWREVQGLEQVEVLQDEKEMLLRFAELIKEGDYDVIVGYNTDSFDFPYIRDRLKKLGISLPLGRLDAELEVSRRGALPEARIRGRAHVDLYPIVRRHVKLNSYDLESVVEELLGIKKEKLDGERLFTYWDEGGEKRALLARYALEDARVTLALAEKFLPLYCELSTIVGQSLNDVARMTSGQLVEWLLMRYATPRGELIPNHPAGEEYAARARATYAGGYVREPKRGLVEHIAVFDFRSFGPSIIVSHNIDPSTLIVGNCEENRAPELEYCFSLEREGFIPAILKELIRRRAEIKRELKRSEGDRRRTLSFAEKALKILANSFYGYMGYPRARWYRRECAESVAAFARMYIKQVMRIAEEEFKLEVVYGDTDSLFVVIPPEKRELAQKFLQKVNESMPGIIELEFEGFYRRGLFVTKKRYALLSEDGKMVVKGLEFVRRDWAPIARETQKEVLRILLEEADPEKAARLVRDVIERIRQRRVSLEDITIYTQLTKRIKSYKSLEPHVVAAQKLKERGREVAPGMIIGYIITKGTKGISQRATPVEFARLEDYDPEYYIDNQILPAIQRIFEAIGYTRDYLKEGITQTSLSRWF

SEQ ID NO: 2716 - protein, 792 aa, unidentified
  REGION 1..792: note = Description of Unknown: Synthetic polypeptide
MPRILKGFLIDADFETVEGRALIRLFLRGEEGSFVVYDDSFSPYFYALPGDEPERVKERILASGAAEAIQKVEIEEKRLFGTPRVALRITVSHPQDVPRIRERIRRVEGVDLILEHDILFVRRRLIDRGIKPLTWLRLEVEERDGRALLRGVEQLEEEPPELRVAAVAIAVYNPKGAPRSSKDEIIMISVADSDGVEKVLTWREVQGLEQVEVLQDEKEMLLRFAELIKEGDYDVIVGYNTDSFDFPYIRDRLKKLGISLPLGRLDAELEVSRRGALPEARIRGRAHVDLYPIVRRHVKLNSYDLESVVEELLGIKKEKLDGERLFTYWDEGGEKRALLARYALEDARVTLALAEKFLPLYCELSTIVGQSLNDVARMTSGQLVEWLLMRYATPRGELIPNHPAGEEYAARARATYAGGYVREPKRGLVEHIAVFDFRSFGPSIIVSHNIDPSTLIVGNCEENRAPELEYCFSLEREGFIPAILKELIRRRAEIKRELKRSEGDRRRTLSFAEKALKILANSFYGYMGYPRARWYRRECAESVAAFARMYIKQVMRIAEEEFKLEVVYGDTDSLFVVIPPEKRELAQKFLQKVNESMPGIIELEFEGFYRRGLFVTKKRYALLSEDGKMVVKGLEFVRRDWAPIARETQKEVLRILLEEADPEKAARLVRDVIERIRQRRVSLEDITIYTQLTKRIKSYKSLEPHVVAAQKLKERGREVAPGMIIGYIITKGTKGISQRATPVEFARLEDYDPEYYIDNQILPAIQRIFEAIGYTRDYLKEGITQTSLSRWF

SEQ ID NO: 2717 - protein, 792 aa, unidentified
  REGION 1..792: note = Description of Unknown: Synthetic polypeptide
MPRILKGFLIDADFETVEGRALIRLFLRGEEGSFVVYDDSFSPYFYALPGDEPERVKERILASGAAEAIQKVEIEEKRLFGTPRVALRITVSHPQDVPAIRERIRRVEGVDLILEHDILFVRRRLIDRGIKPLTWLRLEVEERDGRALLRGVEQLEEEPPELRVAAVAIAVYNPKGAPRSSKDEIIMISVATSDGVEKVLTWREVQGLEQVEVLQDEKEMLLRFAELIKEGDYDVIVGYNTDSFDFPYIRDRLKKLGISLPLGRLDAELEVSRRGALPEARIRGRAHVDLYPIVRRHVKLNSYDLESVVEELLGIKKEKLDGERLFTYWDEGGEKRALLARYALEDARVTLALAEKFLPLYCELSTIVGQSLNDVARMTSGQLVEWLLMRYATPRGELIPNHPAGEEYAARARATYAGGYVREPKRGLVEHIAVFDFRSFGPSIIVSHNIDPSTLIVGNCEENRAPELEYCFSLEREGFIPAILKELIRRRAEIKRELKRSEGDRRRTLSFAEKALKILANSFYGYMGYPRARWYRRECAESVAAFARMYIKQVMRIAEEEFKLEVVYGDTDSLFVVIPPEKRELAQKFLQKVNESMPGIIELEFEGFYRRGLFVTKKRYALLSEDGKMVVKGLEFVRRDWAPIARETQKEVLRILLEEADPEKAARLVRDVIERIRQRRVSLEDITIYTQLTKRIKSYKSLEPHVVAAQKLKERGREVAPGMIIGYIITKGTKGISQRATPVEFARLEDYDPEYYIDNQILPAIQRIFEAIGYTRDYLKEGITQTSLSRWF

SEQ ID NO: 2718 - protein, 792 aa, unidentified
  REGION 1..792: note = Description of Unknown: Synthetic polypeptide
MPRILKGFLIDADFETVEGRALIRLFLRGEEGSFVVYDDSFSPYFYADPGDEPERVKERILASGAAEAIQKVEIEEKRLFGTPRVALRITVSHPQDVPRIRERIRRVEGVDLILEHDILFVRRRLIDRGIKPLTWLRLEVEERDGRALLRGVEQLEEEPPELRVAAVAIAVYNPKGAPRSSKDEIIMISVATSDGVEKVLTWREVQGLEQVEVLQDEKEMLLRFAELIKEGDYDVIVGYNTDSFDFPYIRDRLKKLGISLPLGRLDAELEVSRRGALPEARIRGRAHVDLYPIVRRHVKLNSYDLESVVEELLGIKKEKLDGERLFTYWDEGGEKRALLARYALEDARVTLALGEKFLPLYCELSTIVGQSLNDVARMTSGQLVEWLLMRYATPRGELIPNHPAGEEYAARARATYAGGYVREPKRGLVEHIAVFDFRSFGPSIIVSHNIDPSTLIVGNCEENRAPELEYCFSLEREGFIPAILKELIRRRAEIKRELKRSEGDRRRTLSFAEKALKILANSFYGYMGYPRARWYRRECAESVAAFARMYIKQVMRIAEEEFKLEVVYGDTDSLFVVIPPEKRELAQKFLQKVNESMPGIIELEFEGFYRRGLFVTKKRYALLSEDGKMVVKGLEFVRRDWAPIARETQKEVLRILLEEADPEKAARLVRDVIERIRQRRVSLEDITIYTQLTKRIKSYKSLEPHVVAAQKLKERGREVAPGMIIGYIITKGTKGISQRATPVEFARLEDYDPEYYIDNQILPAIQRIFEAIGYTRDYLKEGITQTSLSRWF

SEQ ID NO: 2719 - protein, 792 aa, unidentified
  REGION 1..792: note = Description of Unknown: Synthetic polypeptide
MPRILKGFLIDADFETVEGRALIRLFLRGEEGSFVVYDDSFSPYFYALPGDEPERVKERILASGAAEAIQKVEIEEKRLFGTPRVALRITVSHPQDVPRIRERIRRVEGVDLILEHDILFVRRRLIDRGIKPLTWLRLEVEERDGRALLRGVEQLEEEPPELRVAAVAIAVYNPKGAPRSSKDEIIMISVATSDGVEKVLTWREVQGLEQVEVLQDEKEMLLRFAELIKEGDYDVIVGYNTDSFDFPYIRDRLKKLGISLPLGRLDAELEVSRRGALPEARIRGRAHVDLYPIVRRHVNLNSYDLESVVEELLGIKKEKLDGERLFTYWDEGGEKRALLARYALEDARVTLALAEKFLPLYCELSTIVGQSLNDVARMTSGQLVEWLLMRYATPRGELIPNHPAGEEYAARARATYAGGYVREPKRGLVEHIAVFDFRSFGPSIIVSHNIDPSTLIVGNCEENRAPELEYCFSLEREGFIPAILKELIRRRAEIKRELKRSEGDRRRTLSFAEKALKILANSFYGYMGYPRARWYRRECAESVAAFARMYIKQVMRIAEEEFKLEVVYGDTDSLFVVIPPEKRELAQKFLQKVNESMPGIIELEFEGFYRRGLFVTKKRYALLSEDGKMVVKGLEFVRRDWAPIARETQKEVLRILLEEADPEKAARLVRDVIERIRQRRVSLEDITIYTQLTKRIKSYKSLEPHVVAAQKLKERGREVAPGMIIGYIITKGTKGISQRATPVEFARLEDYDPEYYIDNQILPAIQRIFEAIGYTRDYLKEGITQTSLSRWF

SEQ ID NO: 2720 - protein, 792 aa, unidentified
  REGION 1..792: note = Description of Unknown: Synthetic polypeptide
MPRILKGFLIDADFETVEGRALIRLFLRGEEGSFVVYDDSFSPYFYALPGDEPERVKVRILASGAAEAIQKVEIEEKRLFGTPRVALRITVSHPQDVPRIRERIRRVEGVDLILEHDILFVRRRLIDRGIKPLTWLRLEVEERDGRALLRGVEQLEEEPPELRVAAVAIAVYNPKGAPRSSKDEIIMISVATSDGVEKVLTWREVQGLEQVEVLQDEKEMLLRFAELIKEGDYDVIVGYNTDSFDFPYIRDRLKKLGISLPLGRLDAELEVSRRGALPEARIRGRAHVDLYPIVRRHVKLNSYDLESVVEELLGIKKEKLDGERLFTYWDEGGEKRALLARYALEDARVTLALAEKFLPLYCELSTIVGQSLNDVARMTSGQLVEWLLMRYATPRGELIPNHPAGEEYAARARATYAGGYVREPKRGLVEHIAVFDFRSFGPSIIVSHNIDPSTLIVGNCEENRAPELEYCFSLEREGFIPAILKELIRRRAEIKRELKRSEGDRRRTLSFAEKALKILANSFYGYMGYPRARWYRRECAESVAAFARMYIKQVMRIAEEEFKLEVVYGDTDSLFVVIPPEKRELAQKFLQKVNESMPGIIELEFEGFYRRGLFVTKKRYALLSEDGKMVVKGLEFVRRDWAPIARETQKEVLRILLEEADPEKAARLVRDVIERIRQRRVSLEDITIYTQLTKRIKSYKSLEPHVVAAQKLKERGREVAPGMIIGYIITKGTKGISQRATPVEFARLEDYDPEYYIDNQILPAIQRIFEAIGYTRDYLKEGITQTSLSRWF

SEQ ID NO: 2721 - protein, 792 aa, unidentified
  REGION 1..792: note = Description of Unknown: Synthetic polypeptide
MPRILKGFLIDADFETVEGRALIRLFLRGEEGSFVVYDDSFSPYFYALPGDEPEIVKERILASGAAEAIQKVEIEEKRLFGTPRVALRITVSHPQDVPRIRERIRRVEGVDLILEHDILFVRRRLIDRGIKPLTWLRLEVEERDGRALLRGVEQLEEEPPELRVAAVAIAVYNPKGAPRSSKDEIIMISVATSDGVEKVLTWREVQGLEQVEVLQDEKEMLLRFAELIKEGDYDVIVGYNTDSFDFPYIRDRLKKLGISLPLGRLDAELEVSRRGALPEARIRGRAHVDLYPIVRRHVKLNSYDLESVVEELLGIKKEKLDGERLFTYWDEGGEKRALLARYALEDARVTLALAEKFLPLYCELSTIVGQSLNDVARMTSGQLVEWLLMRYATPRGELIPNHPAGEEYAARARATYAGGYVREPKRGLVEHIAVFDFRSFGPSIIVSHNIDPSTLIVGNCEENRAPELEYCFSLEREGFIPAILKELIRRRAEIKRELKRSEGDRRRTLSFAEKALKILANSFYGYMGYPRARWYRRECAESVAAFARMYIKQVMRIAEEEFKLEVVYGDTDSLFVVIPPEKRELAQKFLQKVNESMPGIIELEFEGFYRRGLFVTKKRYALLSEDGKMVVKGLEFVRRDWAPIARETQKEVLRILLEEADPEKAARLVRDVIERIRQRRVSLEDITIYTQLTKRIKSYKSLEPHVVAAQKLKERGREVAPGMIIGYIITKGTKGISQRATPVEFARLEDYDPEYYIDNQILPAIQRIFEAIGYTRDYLKEGITQTSLSRWF

SEQ ID NO: 2722 - protein, 792 aa, unidentified
  REGION 1..792: note = Description of Unknown: Synthetic polypeptide
MPRILKGFLIDADFETVEGRALIRLFLRGEEGSFVVYDDSFSPYFYADPGDEPERVKERILASGAAEAIQKVEIEEKRLFGTPRVALRITVSHPQDVPRIRERIRRVEGVDLILEHDILFVRRRLIDRGIKPLTWLRLEVEERDGRALLRGVEQLEEEPPELRVAAVAIAVYNPKGAPRSSKDEIIMISVATSDGVEKVLTWREVQGLEQVEVLQDEKEMLLRFAELIKEGDYDVIVGYNTDSFDFPYIRDRLKKLGISLPLGRLDAELEVSRRGALPEARIRGRIHVDLYPIVRRHVKLNSYDLESVVEELLGIKKEKLDGERLFTYWDEGGEKRALLARYALEDARVTLALAEKFLPLYCELSTIVGQSLNDVARMTSGQLVEWLLMRYATPRGELIPNHPAGEEYAARARATYAGGYVREPKRGLVEHIAVFDFRSFGPSIIVSHNIDPSTLIVGNCEENRAPELEYCFSLEREGFIPAILKELIRRRAEIKRELKRSEGDRRRTLSFAEKALKILANSFYGYMGYPRARWYRRECAESVAAFARMYIKQVMRIAEEEFKLEVVYGDTDSLFVVIPPEKRELAQKFLQKVNESMPGIIELEFEGFYRRGLFVTKKRYALLSEDGKMVVKGLEFVRRDWAPIARETQKEVLRILLEEADPEKAARLVRDVIERIRQRRVSLEDITIYTQLTKRIKSYKSLEPHVVAAQKLKERGREVAPGMIIGYIITKGTKGISQRATPVEFARLEDYDPEYYIDNQILPAIQRIFEAIGYTRDYLKEGITQTSLSRWF

SEQ ID NO: 2723 - protein, 792 aa, unidentified
  REGION 1..792: note = Description of Unknown: Synthetic polypeptide
MPRILKGFLIDADYETVEGRALIRLFLRGEEGSFVVYDDSFSPYFYALPGDEPERVKERILASGAAEAIQKVEIEEKRLFGTPRVALRITVSHPQDVPRIRERIRRVEGVDLILEHDILFVRRRLIDRGIKPLTWLRLEVEERDGRALLRGVEQLEEEPPELRVAAVAIAVYNPKGAPRSSKDEIIMISVATSDGVEKVLTWREVQGLEQVEVLQDEKEMLLRFAELIKEGDYDVIVGYNTDSFDFPYIRDRLKKLGISLPLGRLDAELEVSRRGALPEARIRGRAHVDLYPIVRRHVKLNSYDLESVVEELLGIKKEKLDGERLFTYWDEGGEKRALLARYALEDARVTLALAEKFLPLYCELSTIVGQSLNDVARMTSGQLVEWLLMRYATPRGELIPNHPAGEEYAARARATYAGGYVREPKRGLVEHIAVFDFRSFGPSIIVSHNIDPSTLIVGNCEENRAPELEYCFSLEREGFIPAILKELIRRRAEIKRELKRSEGDRRRTLSFAEKALKILANSFYGYMGYPRARWYRRECAESVAAFARMYIKQVMRIAEEEFKLEVVYGDTDSLFVVIPPEKRELAQKFLQKVNESMPGIIELEFEGFYRRGLFVTKKRYALLSEDGKMVVKGLEFVRRDWAPIARETQKEVLRILLEEADPEKAARLVRDVIERIRQRRVSLEDITIYTQLTKRIKSYKSLEPHVVAAQKLKERGREVAPGMIIGYIITKGTKGISQRATPVEFARLEDYDPEYYIDNQILPAIQRIFEAIGYTRDYLKEGITQTSLSRWF

SEQ ID NO: 2724 - protein, 792 aa, unidentified
  REGION 1..792: note = Description of Unknown: Synthetic polypeptide
MPRILKGFLIDADFETVEGRALIRLFLRGEEGSFVVYDDSFSPYFYALPGDEPERVKERILASGAAEAIQKVEIEEKRLFGTPRVVLRITVSHPQDVPRIRERIRRVEGVDLILEHDILFVRRRLIDRGIKPLTWLRLEVEERDGRALLRGVEQLEEEPPELRVAAVAIAVYNPKGAPRSSKDEIIMISVATSDGVEKVLTWREVQGLEQVEVLQDEKEMLLRFAELIKEGDYDVIVGYNTDSFDFPYIRDRLKKLGISLPLGRLDAELEVSRRGALPEARIRGRAHVDLYPIVRRHVKLNSYDLESVVEELLGIKKEKLDGERLFTYWDEGGEKRALLARYALEDARVTLALAEKFLPLYCELSTIVGQSLNDVARMTSGQLVEWLLMRYATPRGELIPNHPAGEEYAARARATYAGGYVREPKRGLVEHIAVFDFRSFGPSIIVSHNIDPSTLIVGNCEENRAPELEYCFSLEREGFIPAILKELIRRRAEIKRELKRSEGDRRRTLSFAEKALKILANSFYGYMGYPRARWYRRECAESVAAFARMYIKQVMRIAEEEFKLEVVYGDTDSLFVVIPPEKRELAQKFLQKVNESMPGIIELEFEGFYRRGLFVTKKRYALLSEDGKMVVKGLEFVRRDWAPIARETQKEVLRILLEEADPEKAARLVRDVIERIRQRRVSLEDITIYTQLTKRIKSYKSLEPHVVAAQKLKERGREVAPGMIIGYIITKGTKGISQRATPVEFARLEDYDPEYYIDNQILPAIQRIFEAIGYTRDYLKEGITQTSLSRWF

SEQ ID NO: 2725 - protein, 792 aa, unidentified
  REGION 1..792: note = Description of Unknown: Synthetic polypeptide
MPRILKGFLIDADFETVEGRALIRLFLRGEEGSFVVYDDSFSPYFYADPGDEPERVKERILASGAAEAIQKVEIEEKRLFGTPRVALRITVSHPQDVPRIRERIRRVEGVDLILEHDILFVRRCLIDRGIKPLTWLRLEVEERDGRALLRGVEQLEEEPPELRVAAVAIAVYNPKGAPRSSKDEIIMISVATSDGVEKVLTWREVQGLEQVEVLQDEKEMLLRFAELIKEGDYDVIVGYNTDSFDFPYIRDRLKKLGISLPLGRLDAELEVSRRGALPEARIRGRAHVDLYPIVRRHVKLNSYDLESVVEELLGIKKEKLDGERLFTYWDEGGEKRALLARYALEDARVTLALAEKFLPLYCELSTIVGQSLNDVARMTSGQLVEWLLMRYATPRGELIPNHPAGEEYAARARATYAGGYVREPKRGLVEHIAVFDFRSFGPSIIVSHNIDPSTLIVGNCEENRAPELEYCFSLEREGFIPAILKELIRRRAEIKRELKRSEGDRRRTLSFAEKALKILANSFYGYMGYPRARWYRRECAESVAAFARMYIKQVMRIAEEEFKLEVVYGDTDSLFVVIPPEKRELAQKFLQKVNESMPGIIELEFEGFYRRGLFVTKKRYALLSEDGKMVVKGLEFVRRDWAPIARETQKEVLRILLEEADPEKAARLVRDVIERIRQRRVSLEDITIYTQLTKRIKSYKSLEPHVVAAQKLKERGREVAPGMIIGYIITKGTKGISQRATPVEFARLEDYDPEYYIDNQILPAIQRIFEAIGYTRDYLKEGITQTSLSRWF

SEQ ID NO: 2726 - protein, 792 aa, unidentified
  REGION 1..792: note = Description of Unknown: Synthetic polypeptide
MPRILKGFLIDADYETVEGRALIRLFLRGEEGSFVVYDDSFSPYFYALPGDEPERVKERILASGAAEAIQKVEIEEKRLFGTPRVALRITVSHPQDVPRIRERIRRVEGVDLILEHDILFVRRYLIDRGIKPLTWLRLEVEERDGRALLRGVEQLEEEPPELRVAAVDIEVYNPKGAPRSSKDEIIMISVATSDGVEKVLTWREVQGLEQVEVLQDEKEMLLRFAELIKEGDYDVIVGYNTDSFDFPYIRDRLKKLGISLPLGRLDAELEVSRRGALPEARIRGRAHVDLYPIVRRHVKLNSYVLESVVEELLGIKKEKLDGERLFTYWDEGGEKRALLARYALEDARVTLALAEKFLPLYCELSTIVGQSLNDVARMTSGQLVEWLLMRYATPRGELIPNHPAGEEYAARARATYAGGYVREPKRGLVEHIAVFDFRSLGPSIIVSHNIDPSTLIVGNCEENRAPELEYCFSLEREGFIPAILKELIRRRAEIKRELKRSEGDRRRTLSFAEKALKILANSFYGYMGYPRARWYRRECAESVAAFARMYIKQVMRIAEEEFKLEVVYGDTDSLFVVIPPEKRELAQKFLQKVNESMPGIIELEFEGFYRRGLFVTKKRYALLSEDGKMVVKGLEFVRRDWAPIARETQKEVLRILLEEADPEKAARLVRDVIERIRQRRVSLEDITIYTQLTKRIKSYKSLEPHVVAAQKLKERGREVAPGMIIGYIITKGTKGISQRATPVEFARLEDYDPEYYIDNQILPAIQRIFEAIGYTRDYLKEGITQTSLSRWF

SEQ ID NO: 2727 - protein, 792 aa, unidentified
  REGION 1..792: note = Description of Unknown: Synthetic polypeptide
MPRILKGFLIDADFETVEGRALIRLFLRGEEGSFVVYDDSFSPYFYALPGDEPERVKERILASGAAEAIQKVEIEEKRLFGTPRVALRITVSHPQDVPRIRERIRRVEGVDLILEHDILFVRRRLIDRGIKPLTWLRLEVEERDGRALLRGVEQLEEEPPELRVAAVAIAVYNPKGAPRSSKDEIIMISVATSDGVEKVLTWREVQGLEQVEVLQDEKEMLLRFAELIKEKDYDVIVGYNTDSFDFPYIRDRLKKLGISLPLGRLDAELEVSRRGALPEARIRGRAHVDLYPIVRRHVKLNSYDLESVVEELLGIKKEKLDGERLFTYWDEGGEKRALLARYALEDARVTLALAEKFLPLYCELSTIVGQSLNDVARMTSGQLVEWLLMRYATPRGELIPNHPAGEEYAARARATYAGGYVREPKRGLVEHIAVFDFRSFGPSIIVSHNIDPSTLIVGNCEENRAPELEYCFSLEREGFIPAILKELIRRRAEIKRELKRSEGDRRRTLSFAEKALKILANSFYGYMGYPRARWYRRECAESVAAFARMYIKQVMRIAEEEFKLEVVYGDTDSLFVVIPPEKRELAQKFLQKVNESMPGIIELEFEGFYRRGLFVTKKRYALLSEDGKMVVKGLEFVRRDWAPIARETQKEVLRILLEEADPEKAARLVRDVIERIRQRRVSLEDITIYTQLTKRIKSYKSLEPHVVAAQKLKERGREVAPGMIIGYIITKGTKGISQRATPVEFARLEDYDPEYYIDNQILPAIQRIFEAIGYTRDYLKEGITQTSLSRWF

SEQ ID NO: 2728 - protein, 792 aa, unidentified
  REGION 1..792: note = Description of Unknown: Synthetic polypeptide
MPRILKGFLIDADFETVEGRALIRLFLRGEEGSFVVYDDSFSPYFYADPGDEPERVKERILASGAAEAIQKVEIEEKRLFGTPRVALRITVSHPQDVPRIRERIRRVEGVDLILEHDILFVRRRLIDRGIKPLTWLRLEVEERDGRALLRGVEQLEEEPPELRVAAVAIAVYNPKGAPRSSKDEIIMISVATSDGVEKVLTWREVQGLEQVEVLQDEKEMLLRFAELIKEGDYDVIVGYNTDSFDFPYIRDRLKKLGISLPLGRLDAELEVSRRGALPEARIRGRAHVDLYPIVRRHVKLNSYDLESVVEELLGIKKEKLDGERLFTYWDEGGEKRALLARYALEDARVTLALAEKFLPLYCELSTIVGQSLNDVARMTSGQLVEWLLMRYATPRGELAPNHPAGEEYAARARATYAGGYVREPKRGLVEHIAVFDFRSFGPSIIVSHNIDPSTLIVGNCEENRAPELEYCFSLEREGFIPAILKELIRRRAEIKRELKRSEGDRRRTLSFAEKALKILANSFYGYMGYPRARWYRRECAESVAAFARMYIKQVMRIAEEEFKLEVVYGDTDSLFVVIPPEKRELAQKFLQKVNESMPGIIELEFEGFYRRGLFVTKKRYALLSEDGKMVVKGLEFVRRDWAPIARETQKEVLRILLEEADPEKAARLVRDVIERIRQRRVSLEDITIYTQLTKRIKSYKSLEPHVVAAQKLKERGREVAPGMIIGYIITKGTKGISQRATPVEFARLEDYDPEYYIDNQILPAIQRIFEAIGYTRDYLKEGITQTSLSRWF

SEQ ID NO: 2729 - protein, 792 aa, unidentified
  REGION 1..792: note = Description of Unknown: Synthetic polypeptide
MPRILKGFLIDADFETVEGRALIRLFLRGEEGSFVVYDDSFSPYFYALPGDEPERVKERILASGAAEAIQKVEKEEKRLFGTPRVALRITVSHPQDVPRIRERIRRVEGVDLILEHDILFVRRRLIDRGIKPLTWLRLEVEERDGRALLRGVEQLEEEPPELRVAAVAIAVYNPKGAPRSSKDEIIMISVATSDGVEKVLTWREVQGLEQVEVLQDEKEMLLRFAELIKEGDYDVIVGYNTDSFDFPYIRDRLKKLGISLPLGRLDAELEVSRRGALPEARIRGRAHVDLYPIVRRHVKLNSYDLESVVEELLGIKKEKLDGERLFTYWDEGGEKRALLARYALEDARVTLALAEKFLPLYCELSTIVGQSLNDVARMTSGQLVEWLLMRYATPRGELIPNHPAGEEYAARARATYAGGYVREPKRGLVEHIAVFDFRSFGPSIIVSHNIDPSTLIVGNCEENRAPELEYCFSLEREGFIPAILKELIRRRAEIKRELKRSEGDRRRTLSFAEKALKILANSFYGYMGYPRARWYRRECAESVAAFARMYIKQVMRIAEEEFKLEVVYGDTDSLFVVIPPEKRELAQKFLQKVNESMPGIIELEFEGFYRRGLFVTKKRYALLSEDGKMVVKGLEFVRRDWAPIARETQKEVLRILLEEADPEKAARLVRDVIERIRQRRVSLEDITIYTQLTKRIKSYKSLEPHVVAAQKLKERGREVAPGMIIGYIITKGTKGISQRATPVEFARLEDYDPEYYIDNQILPAIQRIFEAIGYTRDYLKEGITQTSLSRWF

SEQ ID NO: 2730 - protein, 792 aa, unidentified
  REGION 1..792: note = Description of Unknown: Synthetic polypeptide
MPRILKGFLIDADYETVEGRALIRLFLRGEEGSFVVYDDSFSPYFYALPGDEPERVKERILASGAAEAIQKVEIEEKRLFGTPRVALRITVSHPQDVPRIRERIRRVEGVDLILEHDILFVRRYLIDRGIKPLTWLRLEVEERDGRALLRGVEQLEEEPPELRVAAVAIEVYNPKGAPRSSKDEIIMISVATSDGVEKVLTWREVQGLEQVEVLQDEKEMLLRFAELIKEGDYDVIVGYNTDSFDFPYIRDRLKKLGISLPLGRLDAELEVSRRGALPEARIRGRAHVDLYPIVRRHVKLNSYVLESVVEELLGIKKEKLDGERLFTYWDEGGEKRALLARYALEDARVTLALAEKFLPLYCELSTIVGQSLNDVARMTSGQLVEWLLMRYATPRGELIPNHPAGEEYAARARATYAGGYVREPKRGLVEHIAVFDFRSLYPSIIVSHNIDPSTLIVGNCEENRAPELEYCFSLEREGFIPAILKELIRRRAEIKRELKRSEGDRRRTLSFAEKALKILANSFYGYMGYPRARWYRRECAESVAAFARMYIKQVMRIAEEEFKLEVVYGDTDSLFVVIPPEKRELAQKFLQKVNESMPGIIELEFEGFYRRGLFVTKKRYALLSEDGKMVVKGLEFVRRDWAPIARETQKEVLRILLEEADPEKAARLVRDVIERIRQRRVSLEDITIYTQLTKRIKSYKSLEPHVVAAQKLKERGREVAPGMIIGYIITKGTKGISQRATPVEFARLEDYDPEYYIDNQILPAIQRIFEAIGYTRDYLKEGITQTSLSRWF

SEQ ID NO: 2731 - protein, 792 aa, unidentified
  REGION 1..792: note = Description of Unknown: Synthetic polypeptide
MPRILKGFLIDADFETVEGRALIRLFLREEEGSFVVYDDSFSPYFYALPGDEPERVKERILASGAAEAIQKVEIEEKRLFGTPRVALRITVSHPQDVPRIRERIRRVEGVDLILEHDILFVRRRLIDRGIKPLTWLRLEVEERDGRALLRGVEQLEEEPPELRVAAVAIAVYNPKGAPRSSKDEIIMISVATSDGVEKVLTWREVQGLEQVEVLQDEKEMLLRFAELIKEGDYDVIVGYNTDSFDFPYIRDRLKKLGISLPLGRLDAELEVSRRGALPEARIRGRAHVDLYPIVRRHVKLNSYDLESVVEELLGIKKEKLDGERLFTYWDEGGEKRALLARYALEDARVTLALAEKFLPLYCELSTIVGQSLNDVARMTSGQLVEWLLMRYATPRGELIPNHPAGEEYAARARATYAGGYVREPKRGLVEHIAVFDFRSFGPSIIVSHNIDPSTLIVGNCEENRAPELEYCFSLEREGFIPAILKELIRRRAEIKRELKRSEGDRRRTLSFAEKALKILANSFYGYMGYPRARWYRRECAESVAAFARMYIKQVMRIAEEEFKLEVVYGDTDSLFVVIPPEKRELAQKFLQKVNESMPGIIELEFEGFYRRGLFVTKKRYALLSEDGKMVVKGLEFVRRDWAPIARETQKEVLRILLEEADPEKAARLVRDVIERIRQRRVSLEDITIYTQLTKRIKSYKSLEPHVVAAQKLKERGREVAPGMIIGYIITKGTKGISQRATPVEFARLEDYDPEYYIDNQILPAIQRIFEAIGYTRDYLKEGITQTSLSRWF

SEQ ID NO: 2732 - protein, 792 aa, unidentified
  REGION 1..792: note = Description of Unknown: Synthetic polypeptide
MPRILKGFLIDADFETVEGRALIRFFLRGEEGSFVVYDDSFSPYFYALPGDEPERVKERILASGAAEAIQKVEIEEKRLFGTPRVALRITVSHPQDVPRIRERIRRVEGVDLILEHDILFVRRRLIDRGIKPLTWLRLEVEERDGRALLRGVEQLEEEPPELRVAAVAIAVYNPKGAPRSSKDEIIMISVATSDGVEKVLTWREVQGLEQVEVLQDEKEMLLRFAELIKEGDYDVIVGYNTDSFDFPYIRDRLKKLGISLPLGRLDAELEVSRRGALPEARIRGRAHVDLYPIVRRHVKLNSYDLESVVEELLGIKKEKLDGERLFTYWDEGGEKRALLARYALEDARVTLALAEKFLPLYCELSTIVGQSLNDVARMTSGQLVEWLLMRYATPRGELIPNHPAGEEYAARARATYAGGYVREPKRGLVEHIAVFDFRSFGPSIIVSHNIDPSTLIVGNCEENRAPELEYCFSLEREGFIPAILKELIRRRAEIKRELKRSEGDRRRTLSFAEKALKILANSFYGYMGYPRARWYRRECAESVAAFARMYIKQVMRIAEEEFKLEVVYGDTDSLFVVIPPEKRELAQKFLQKVNESMPGIIELEFEGFYRRGLFVTKKRYALLSEDGKMVVKGLEFVRRDWAPIARETQKEVLRILLEEADPEKAARLVRDVIERIRQRRVSLEDITIYTQLTKRIKSYKSLEPHVVAAQKLKERGREVAPGMIIGYIITKGTKGISQRATPVEFARLEDYDPEYYIDNQILPAIQRIFEAIGYTRDYLKEGITQTSLSRWF

SEQ ID NO: 2733 - protein, 792 aa, unidentified
  REGION 1..792: note = Description of Unknown: Synthetic polypeptide
MPRILKGFLIDADFETVEGRALIRLFLRGEEGSFVVYDDSFSPYFYADPGDEPERVKERILASGAAEAIQKVEIEEKRLFGTPRVALRITVSHPQDVPRIRERIRRVEGVDLILEHDILFVRRRLIDRGIKPLTWLRLVVEERDGRALLRGVEQLEEEPPELRVAAVAIAVYNPKGAPRSSKDEIIMISVATSDGVEKVLTWREVQGLEQVEVLQDEKEMLLRFAELIKEGDYDVIVGYNTDSFDFPYIRDRLKKLGISLPLGRLDAELEVSRRGALPEARIRGRAHVDLYPIVRRHVKLNSYDLESVVEELLGIKKEKLDGERLFTYWDEGGEKRALLARYALEDARVTLALAEKFLPLYCELSTIVGQSLNDVARMTSGQLVEWLLMRYATPRGELIPNHPAGEEYAARARATYAGGYVREPKRGLVEHIAVFDFRSFGPSIIVSHNIDPSTLIVGNCEENRAPELEYCFSLEREGFIPAILKELIRRRAEIKRELKRSEGDRRRTLSFAEKALKILANSFYGYMGYPRARWYRRECAESVAAFARMYIKQVMRIAEEEFKLEVVYGDTDSLFVVIPPEKRELAQKFLQKVNESMPGIIELEFEGFYRRGLFVTKKRYALLSEDGKMVVKGLEFVRRDWAPIARETQKEVLRILLEEADPEKAARLVRDVIERIRQRRVSLEDITIYTQLTKRIKSYKSLEPHVVAAQKLKERGREVAPGMIIGYIITKGTKGISQRATPVEFARLEDYDPEYYIDNQILPAIQRIFEAIGYTRDYLKEGITQTSLSRWF

SEQ ID NO: 2734 - protein, 792 aa, unidentified
  REGION 1..792: note = Description of Unknown: Synthetic polypeptide
MPRILKGFLIDADFETVEGRALIRLFLRGEEGSFVVYDDSFSPYFYALPGDEPERVKERILASGAAEAIQKVEIEEKRLFGTPRVALRITVSHPQDVPRIRERIRRVEGVDLILEHDILFVRRRLIDRGIKPLTWLRLEVEERDGRALLRGVEQLEEEPPELRVAAVAIAVYNPKGAPRSSKDEIIMISVATSDGVEKVLTWREVQGLEQVEVLQDEKEMLLRFAELIKEGDYDVIVGYNTDSFDFPYIRDRLKKLGISLPLGRLDAELEVSRRGALPEARIRGRAHVDLYPIVRRHVKLNSYVLESVVEELLGIKKEKLDGERLFTYWDEGGEKRALLARYALEDARVTLALAEKFLPLYCELSTIVGQSLNDVARMTSGQLVEWLLMRYATPRGELIPNHPAGEEYAARARATYAGGYVREPKRGLVEHIAVFDFRSFGPSIIVSHNIDPSTLIVGNCEENRAPELEYCFSLEREGFIPAILKELIRRRAEIKRELKRSEGDRRRTLSFAEKALKILANSFYGYMGYPRARWYRRECAESVAAFARMYIKQVMRIAEEEFKLEVVYGDTDSLFVVIPPEKRELAQKFLQKVNESMPGIIELEFEGFYRRGLFVTKKRYALLSEDGKMVVKGLEFVRRDWAPIARETQKEVLRILLEEADPEKAARLVRDVIERIRQRRVSLEDITIYTQLTKRIKSYKSLEPHVVAAQKLKERGREVAPGMIIGYIITKGTKGISQRATPVEFARLEDYDPEYYIDNQILPAIQRIFEAIGYTRDYLKEGITQTSLSRWF

SEQ ID NO: 2735 - protein, 792 aa, unidentified
  REGION 1..792: note = Description of Unknown: Synthetic polypeptide
MPRILKGFLIDADFETVEGRALIRLFLRGEEGSFVVYDDSFSPYFYALPGDEPERVKERILASGAAEAIQKVEIEEKRLFGTPRVALRITVSHPQDVPRIRERIRRVEGVDLILEHDILFVRRRLIDRGIKPLTWLRLVVEERDGRALLRGVEQLEEEPPELRVAAVAIAVYNPKGAPRSSKDEIIMISVATSDGVEKVLTWREVQGLEQVEVLQDEKEMLLRFAELIKEGDYDVIVGYNTDSFDFPYIRDRLKKLGISLPLGRLDAELEVSRRGALPEARIRGRAHVDLYPIVRRHVKLNSYDLESVVEELLGIKKEKLDGERLFTYWDEGGEKRALLARYALEDARVTLALAEKFLPLYCELSTIVGQSLNDVARMTSGQLVEWLLMRYATPRGELIPNHPAGEEYAARARATYAGGYVREPKRGLVEHIAVFDFRSFGPSIIVSHNIDPSTLIVGNCEENRAPELEYCFSLEREGFIPAILKELIRRRAEIKRELKRSEGDRRRTLSFAEKALKILANSFYGYMGYPRARWYRRECAESVAAFARMYIKQVMRIAEEEFKLEVVYGDTDSLFVVIPPEKRELAQKFLQKVNESMPGIIELEFEGFYRRGLFVTKKRYALLSEDGKMVVKGLEFVRRDWAPIARETQKEVLRILLEEADPEKAARLVRDVIERIRQRRVSLEDITIYTQLTKRIKSYKSLEPHVVAAQKLKERGREVAPGMIIGYIITKGTKGISQRATPVEFARLEDYDPEYYIDNQILPAIQRIFEAIGYTRDYLKEGITQTSLSRWF

SEQ ID NO: 2736 - protein, 792 aa, unidentified
  REGION 1..792: note = Description of Unknown: Synthetic polypeptide
MPRILKGFLIDADFETVEGRALIRLFLRGEEGSFVVYDDSFSPYFYALPGDEPERVKERILASGAAEAIQKVEIEEKRLFGTPREALRITVSHPQDVPRIRERIRRVEGVDLILEHDILFVRRRLIDRGIKPLTWLRLEVEERDGRALLRGVEQLEEEPPELRVAAVAIAVYNPKGAPRSSKDEIIMISVATSDGVEKVLTWREVQGLEQVEVLQDEKEMLLRFAELIKEGDYDVIVGYNTDSFDFPYIRDRLKKLGISLPLGRLDAELEVSRRGALPEARIRGRAHVDLYPIVRRHVKLNSYDLESVVEELLGIKKEKLDGERLFTYWDEGGEKRALLARYALEDARVTLALAEKFLPLYCELSTIVGQSLNDVARMTSGQLVEWLLMRYATPRGELIPNHPAGEEYAARARATYAGGYVREPKRGLVEHIAVFDFRSFGPSIIVSHNIDPSTLIVGNCEENRAPELEYCFSLEREGFIPAILKELIRRRAEIKRELKRSEGDRRRTLSFAEKALKILANSFYGYMGYPRARWYRRECAESVAAFARMYIKQVMRIAEEEFKLEVVYGDTDSLFVVIPPEKRELAQKFLQKVNESMPGIIELEFEGFYRRGLFVTKKRYALLSEDGKMVVKGLEFVRRDWAPIARETQKEVLRILLEEADPEKAARLVRDVIERIRQRRVSLEDITIYTQLTKRIKSYKSLEPHVVAAQKLKERGREVAPGMIIGYIITKGTKGISQRATPVEFARLEDYDPEYYIDNQILPAIQRIFEAIGYTRDYLKEGITQTSLSRWF

SEQ ID NO: 2737 - protein, 792 aa, unidentified
  REGION 1..792: note = Description of Unknown: Synthetic polypeptide
MPRILKGFLIDADFETVEGRALIRLFLRGEEGSFVVYDDSFSPYFYALPGDEPERVKERILASGAAEAIQKVEIEEKRLFGTPRVALRITVSHPQDVPRIRERIRRVEGVDLILEHDILFVRRRLIDRGIKPLTWLRLEVEERDGRALLRGVEQLEEEPPELRVAAVAIAVYNPKGAPRSSKDEIIMISVATSDGVEKVLTWREVQGLEQVEVLQDEKEMLLRFAELIKEGDYDVIVGYNTDSFDFPYIRDRLKKLGISLPLGRLDAELEVSRRGALPEARIRGRAHVDLYPIVRRHVKLNSYDLESVVEELLGIKKEKLDGERLFTYWDEGGEKRALLARYALEDARVTLALAEKFLPLYCELSTIVGQSLNDVARMTSGQLVEWLLMRYATPRGELIPNHPAGEEYAARARATYAGGYVREPKRGLVEHIAVFDFRSLGPSIIVSHNIDPSTLIVGNCEENRAPELEYCFSLEREGFIPAILKELIRRRAEIKRELKRSEGDRRRTLSFAEKALKILANSFYGYMGYPRARWYRRECAESVAAFARMYIKQVMRIAEEEFKLEVVYGDTDSLFVVIPPEKRELAQKFLQKVNESMPGIIELEFEGFYRRGLFVTKKRYALLSEDGKMVVKGLEFVRRDWAPIARETQKEVLRILLEEADPEKAARLVRDVIERIRQRRVSLEDITIYTQLTKRIKSYKSLEPHVVAAQKLKERGREVAPGMIIGYIITKGTKGISQRATPVEFARLEDYDPEYYIDNQILPAIQRIFEAIGYTRDYLKEGITQTSLSRWF

SEQ ID NO: 2738 - protein, 792 aa, unidentified
  REGION 1..792: note = Description of Unknown: Synthetic polypeptide
MPRILKGFLIDADYETVEGRALIRLFLRGEEGSFVVYDDSFSPYFYALPGDEPERVKERILASGAAEAIQKVEIEEKRLFGTPRVALRITVSHPQDVPRIRERIRRVEGVDLILEHDILFVRRRLIDRGIKPLTWLRLEVEERDGRALLRGVEQLEEEPPELRVAAVDIEVYNPKGAPRSSKDEIIMISVATSDGVEKVLTWREVQGLEQVEVLQDEKEMLLRFAELIKEGDYDVIVGYNTDSFDFPYIRDRLKKLGISLPLGRLDAELEVSRRGALPEARIRGRAHVDLYPIVRRHVKLNSYVLESVVEELLGIKKEKLDGERLFTYWDEGGEKRALLARYALEDARVTLALAEKFLPLYCELSTIVGQSLNDVARMTSGQLVEWLLMRYATPRGELIPNHPAGEEYAARARATYAGGYVREPKRGLVEHIAVFDFRSLYPSIIVSHNIDPSTLIVGNCEENRAPELEYCFSLEREGFIPAILKELIRRRAEIKRELKRSEGDRRRTLSFAEKALKILANSFYGYMGYPRARWYRRECAESVAAFARMYIKQVMRIAEEEFKLEVVYGDTDSLFVVIPPEKRELAQKFLQKVNESMPGIIELEFEGFYRRGLFVTKKRYALLSEDGKMVVKGLEFVRRDWAPIARETQKEVLRILLEEADPEKAARLVRDVIERIRQRRVSLEDITIYTQLTKRIKSYKSLEPHVVAAQKLKERGREVAPGMIIGYIITKGTKGISQRATPVEFARLEDYDPEYYIDNQILPAIQRIFEAIGYTRDYLKEGITQTSLSRWF

SEQ ID NO: 2739 - protein, 792 aa, unidentified
  REGION 1..792: note = Description of Unknown: Synthetic polypeptide
MPRILKGFLIDADFETVEGRALIRLFLRGEEGSFVVYDDSFSPYFYALPGDEPERVKERILASGAAEAIQKVEIEEKRLFGTPRVAWRITVSHPQDVPRIRERIRRVEGVDLILEHDILFVRRRLIDRGIKPLTWLRLEVEERDGRALLRGVEQLEEEPPELRVAAVAIAVYNPKGAPRSSKDEIIMISVATSDGVEKVLTWREVQGLEQVEVLQDEKEMLLRFAELIKEGDYDVIVGYNTDSFDFPYIRDRLKKLGISLPLGRLDAELEVSRRGALPEARIRGRAHVDLYPIVRRHVKLNSYDLESVVEELLGIKKEKLDGERLFTYWDEGGEKRALLARYALEDARVTLALAEKFLPLYCELSTIVGQSLNDVARMTSGQLVEWLLMRYATPRGELIPNHPAGEEYAARARATYAGGYVREPKRGLVEHIAVFDFRSFGPSIIVSHNIDPSTLIVGNCEENRAPELEYCFSLEREGFIPAILKELIRRRAEIKRELKRSEGDRRRTLSFAEKALKILANSFYGYMGYPRARWYRRECAESVAAFARMYIKQVMRIAEEEFKLEVVYGDTDSLFVVIPPEKRELAQKFLQKVNESMPGIIELEFEGFYRRGLFVTKKRYALLSEDGKMVVKGLEFVRRDWAPIARETQKEVLRILLEEADPEKAARLVRDVIERIRQRRVSLEDITIYTQLTKRIKSYKSLEPHVVAAQKLKERGREVAPGMIIGYIITKGTKGISQRATPVEFARLEDYDPEYYIDNQILPAIQRIFEAIGYTRDYLKEGITQTSLSRWF

SEQ ID NO: 2740 - protein, 792 aa, unidentified
  REGION 1..792: note = Description of Unknown: Synthetic polypeptide
MPRILKGFLIDADFETVEGRALIRLFLRGEEGSFVVYDDSFSPYFYALPGDEPERVKERILASGAAEAIQKVEIEEKRLFGTPRVALRITVSHPQDVPRIRERIRRVEGVDLILEHDILFVRRRLIDRGIKPLTWLRLEVEERDGRALLRGVEQLEEEPPELRVAAVAIAVYNPKGAPRSSKDEIIMISVATSDGVEKVLTWREVQGLEQVEVLQDEKEMLLRFAELIKEGDYDVIVGYNTDSFDFPYIRDRLKKLGISLPLGRLDAELEVSRRGDLPEARIRGRAHVDLYPIVRRHVKLNSYDLESVVEELLGIKKEKLDGERLFTYWDEGGEKRALLARYALEDARVTLALAEKFLPLYCELSTIVGQSLNDVARMTSGQLVEWLLMRYATPRGELIPNHPAGEEYAARARATYAGGYVREPKRGLVEHIAVFDFRSFGPSIIVSHNIDPSTLIVGNCEENRAPELEYCFSLEREGFIPAILKELIRRRAEIKRELKRSEGDRRRTLSFAEKALKILANSFYGYMGYPRARWYRRECAESVAAFARMYIKQVMRIAEEEFKLEVVYGDTDSLFVVIPPEKRELAQKFLQKVNESMPGIIELEFEGFYRRGLFVTKKRYALLSEDGKMVVKGLEFVRRDWAPIARETQKEVLRILLEEADPEKAARLVRDVIERIRQRRVSLEDITIYTQLTKRIKSYKSLEPHVVAAQKLKERGREVAPGMIIGYIITKGTKGISQRATPVEFARLEDYDPEYYIDNQILPAIQRIFEAIGYTRDYLKEGITQTSLSRWF

SEQ ID NO: 2741 - protein, 792 aa, unidentified
  REGION 1..792: note = Description of Unknown: Synthetic polypeptide
MPRILKGFLIDADFETVEGRALIRLFLRGEEGSFVVYDDSFSPYFYALPGDEPERVKERILASGAAEAIQKVEIEEKRLFGTPRVALRITVSHPQDVPRIRERIRRVEGVDLILEHDILFVRRRLIDRGIKPLTWLRLEVEERDGRALLRGVEQLEEEPPELRVAAVAIEVYNPKGAPRSSKDEIIMISVATSDGVEKVLTWREVQGLEQVEVLQDEKEMLLRFAELIKEGDYDVIVGYNTDSFDFPYIRDRLKKLGISLPLGRLDAELEVSRRGALPEARIRGRAHVDLYPIVRRHVKLNSYDLESVVEELLGIKKEKLDGERLFTYWDEGGEKRALLARYALEDARVTLALAEKFLPLYCELSTIVGQSLNDVARMTSGQLVEWLLMRYATPRGELIPNHPAGEEYAARARATYAGGYVREPKRGLVEHIAVFDFRSFGPSIIVSHNIDPSTLIVGNCEENRAPELEYCFSLEREGFIPAILKELIRRRAEIKRELKRSEGDRRRTLSFAEKALKILANSFYGYMGYPRARWYRRECAESVAAFARMYIKQVMRIAEEEFKLEVVYGDTDSLFVVIPPEKRELAQKFLQKVNESMPGIIELEFEGFYRRGLFVTKKRYALLSEDGKMVVKGLEFVRRDWAPIARETQKEVLRILLEEADPEKAARLVRDVIERIRQRRVSLEDITIYTQLTKRIKSYKSLEPHVVAAQKLKERGREVAPGMIIGYIITKGTKGISQRATPVEFARLEDYDPEYYIDNQILPAIQRIFEAIGYTRDYLKEGITQTSLSRWF

SEQ ID NO: 2742 - protein, 792 aa, unidentified
  REGION 1..792: note = Description of Unknown: Synthetic polypeptide
MPRILKGFLIDADFETEEGRALIRLFLRGEEGSFVVYDDSFSPYFYALPGDEPERVKERILASGAAEAIQKVEIEEKRLFGTPRVALRITVSHPQDVPRIRERIRRVEGVDLILEHDILFVRRRLIDRGIKPLTWLRLEVEERDGRALLRGVEQLEEEPPELRVAAVAIAVYNPKGAPRSSKDEIIMISVATSDGVEKVLTWREVQGLEQVEVLQDEKEMLLRFAELIKEGDYDVIVGYNTDSFDFPYIRDRLKKLGISLPLGRLDAELEVSRRGALPEARIRGRAHVDLYPIVRRHVKLNSYDLESVVEELLGIKKEKLDGERLFTYWDEGGEKRALLARYALEDARVTLALAEKFLPLYCELSTIVGQSLNDVARMTSGQLVEWLLMRYATPRGELIPNHPAGEEYAARARATYAGGYVREPKRGLVEHIAVFDFRSFGPSIIVSHNIDPSTLIVGNCEENRAPELEYCFSLEREGFIPAILKELIRRRAEIKRELKRSEGDRRRTLSFAEKALKILANSFYGYMGYPRARWYRRECAESVAAFARMYIKQVMRIAEEEFKLEVVYGDTDSLFVVIPPEKRELAQKFLQKVNESMPGIIELEFEGFYRRGLFVTKKRYALLSEDGKMVVKGLEFVRRDWAPIARETQKEVLRILLEEADPEKAARLVRDVIERIRQRRVSLEDITIYTQLTKRIKSYKSLEPHVVAAQKLKERGREVAPGMIIGYIITKGTKGISQRATPVEFARLEDYDPEYYIDNQILPAIQRIFEAIGYTRDYLKEGITQTSLSRWF

SEQ ID NO: 2743 - protein, 792 aa, unidentified
  REGION 1..792: note = Description of Unknown: Synthetic polypeptide
MPRILKGFLIDADFETVDGRALIRLFLRGEEGSFVVYDDSFSPYFYALPGDEPERVKERILASGAAEAIQKVEIEEKRLFGTPRVALRITVSHPQDVPRIRERIRRVEGVDLILEHDILFVRRRLIDRGIKPLTWLRLEVEERDGRALLRGVEQLEEEPPELRVAAVAIAVYNPKGAPRSSKDEIIMISVATSDGVEKVLTWREVQGLEQVEVLQDEKEMLLRFAELIKEGDYDVIVGYNTDSFDFPYIRDRLKKLGISLPLGRLDAELEVSRRGALPEARIRGRAHVDLYPIVRRHVKLNSYDLESVVEELLGIKKEKLDGERLFTYWDEGGEKRALLARYALEDARVTLALAEKFLPLYCELSTIVGQSLNDVARMTSGQLVEWLLMRYATPRGELIPNHPAGEEYAARARATYAGGYVREPKRGLVEHIAVFDFRSFGPSIIVSHNIDPSTLIVGNCEENRAPELEYCFSLEREGFIPAILKELIRRRAEIKRELKRSEGDRRRTLSFAEKALKILANSFYGYMGYPRARWYRRECAESVAAFARMYIKQVMRIAEEEFKLEVVYGDTDSLFVVIPPEKRELAQKFLQKVNESMPGIIELEFEGFYRRGLFVTKKRYALLSEDGKMVVKGLEFVRRDWAPIARETQKEVLRILLEEADPEKAARLVRDVIERIRQRRVSLEDITIYTQLTKRIKSYKSLEPHVVAAQKLKERGREVAPGMIIGYIITKGTKGISQRATPVEFARLEDYDPEYYIDNQILPAIQRIFEAIGYTRDYLKEGITQTSLSRWF

SEQ ID NO: 2744 - protein, 792 aa, unidentified
  REGION 1..792: note = Description of Unknown: Synthetic polypeptide
MPRILKGFLIDADFETVEGRALIRLFKRGEEGSFVVYDDSFSPYFYALPGDEPERVKERILASGAAEAIQKVEIEEKRLFGTPRVALRITVSHPQDVPRIRERIRRVEGVDLILEHDILFVRRRLIDRGIKPLTWLRLEVEERDGRALLRGVEQLEEEPPELRVAAVAIAVYNPKGAPRSSKDEIIMISVATSDGVEKVLTWREVQGLEQVEVLQDEKEMLLRFAELIKEGDYDVIVGYNTDSFDFPYIRDRLKKLGISLPLGRLDAELEVSRRGALPEARIRGRAHVDLYPIVRRHVKLNSYDLESVVEELLGIKKEKLDGERLFTYWDEGGEKRALLARYALEDARVTLALAEKFLPLYCELSTIVGQSLNDVARMTSGQLVEWLLMRYATPRGELIPNHPAGEEYAARARATYAGGYVREPKRGLVEHIAVFDFRSFGPSIIVSHNIDPSTLIVGNCEENRAPELEYCFSLEREGFIPAILKELIRRRAEIKRELKRSEGDRRRTLSFAEKALKILANSFYGYMGYPRARWYRRECAESVAAFARMYIKQVMRIAEEEFKLEVVYGDTDSLFVVIPPEKRELAQKFLQKVNESMPGIIELEFEGFYRRGLFVTKKRYALLSEDGKMVVKGLEFVRRDWAPIARETQKEVLRILLEEADPEKAARLVRDVIERIRQRRVSLEDITIYTQLTKRIKSYKSLEPHVVAAQKLKERGREVAPGMIIGYIITKGTKGISQRATPVEFARLEDYDPEYYIDNQILPAIQRIFEAIGYTRDYLKEGITQTSLSRWF

SEQ ID NO: 2745 - protein, 792 aa, unidentified
  REGION 1..792: note = Description of Unknown: Synthetic polypeptide
MPRILKGFLIDADFETVEGRALIRLFLRGEEGSFVVYDDSFSPYFYALPGDEPERVKERILASGAAEAIQKVEIEEKRLFGTPRVALRITVSHPQDVPRIRERIRRVEGVDLILEHDILFVRRRLIDRGIKPLTWLRLEVEERDGRALLRGVEQLEEEPPELRVAAVDIAVYNPKGAPRSSKDEIIMISVATSDGVEKVLTWREVQGLEQVEVLQDEKEMLLRFAELIKEGDYDVIVGYNTDSFDFPYIRDRLKKLGISLPLGRLDAELEVSRRGALPEARIRGRAHVDLYPIVRRHVKLNSYDLESVVEELLGIKKEKLDGERLFTYWDEGGEKRALLARYALEDARVTLALAEKFLPLYCELSTIVGQSLNDVARMTSGQLVEWLLMRYATPRGELIPNHPAGEEYAARARATYAGGYVREPKRGLVEHIAVFDFRSFGPSIIVSHNIDPSTLIVGNCEENRAPELEYCFSLEREGFIPAILKELIRRRAEIKRELKRSEGDRRRTLSFAEKALKILANSFYGYMGYPRARWYRRECAESVAAFARMYIKQVMRIAEEEFKLEVVYGDTDSLFVVIPPEKRELAQKFLQKVNESMPGIIELEFEGFYRRGLFVTKKRYALLSEDGKMVVKGLEFVRRDWAPIARETQKEVLRILLEEADPEKAARLVRDVIERIRQRRVSLEDITIYTQLTKRIKSYKSLEPHVVAAQKLKERGREVAPGMIIGYIITKGTKGISQRATPVEFARLEDYDPEYYIDNQILPAIQRIFEAIGYTRDYLKEGITQTSLSRWF

SEQ ID NO: 2746 - protein, 792 aa, unidentified
  REGION 1..792: note = Description of Unknown: Synthetic polypeptide
MPRILKGFLIDADFETVEGRALIRLFLRGEEGSFVVYDDSFSPYFYALPGDEPERVKERILASGAAEAIQKVEIEEKRLFGTPRVALRITVSHPQDVPRIRERIRRVEGVDLILEHDILFVRRRLIDRGIKPLTWLRLEVEERDGRALLRGVEQLEEEPPELRVAAVAIAVYNPKGAPRSSKDEIIMISVATSDGVEKVLTWREVQGLEQVEVLQDEKEMLLRFAELIKEGDYDVIVGYNTDSFDFPYIRDRLKKLGISLPLGRLDAELEVSRRGALPEARIRGRAHVDLYPIVRRHVKLNSYDLESVVEELLGIKKEKLDGERLFTYWDEGGEKRALLARYALEDARVTLALAEKFLPLYCELSTIVGQSLNDVARMTSGQLVEWLLMRYATPRGELIPNHPAGEEYAARARATYAGGYVREPKRGLVEHIAVFDFRSFGPSIIVSHNIDPSTLIVGNCEENRAPELEYCFSLEREGFIPAILKELIRRRAEIKRELKRSEGDRRRTLSFAEKALKILANSFYGYMGYPRARWYCRECAESVAAFARMYIKQVMRIAEEEFKLEVVYGDTDSLFVVIPPEKRELAQKFLQKVNESMPGIIELEFEGFYRRGLFVTKKRYALLSEDGKMVVKGLEFVRRDWAPIARETQKEVLRILLEEADPEKAARLVRDVIERIRQRRVSLEDITIYTQLTKRIKSYKSLEPHVVAAQKLKERGREVAPGMIIGYIITKGTKGISQRATPVEFARLEDYDPEYYIDNQILPAIQRIFEAIGYTRDYLKEGITQTSLSRWF

SEQ ID NO: 2747 - protein, 792 aa, unidentified
  REGION 1..792: note = Description of Unknown: Synthetic polypeptide
MPRILKGFLIDADYETVEGRALIRLFLRGEEGSFVVYDDSFSPYFYALPGDEPERVKERILASGAAEAIQKVEIEEKRLFGTPRVALRITVSHPQDVPRIRERIRRVEGVDLILEHDILFVRRYLIDRGIKPLTWLRLEVEERDGRALLRGVEQLEEEPPELRVAAVAIQVYNPKGAPRSSKDEIIMISVATSDGVEKVLTWREVQGLEQVEVLQDEKEMLLRFAELIKEGDYDVIVGYNTDSFDFPYIRDRLKKLGISLPLGRLDAELEVSRRGALPEARIRGRAHVDLYPIVRRHVKLNSYVLESVVEELLGIKKEKLDGERLFTYWDEGGEKRALLARYALEDARVTLALAEKFLPLYCELSTIVGQSLNDVARMTSGQLVEWLLMRYATPRGELIPNHPAGEEYAARARATYAGGYVREPKRGLVEHIAVFDFRSLYPSIIVSHNIDPSTLIVGNCEENRAPELEYCFSLEREGFIPAILKELIRRRAEIKRELKRSEGDRRRTLSFAEKALKILANSFYGYMGYPRARWYRRECAESVAAFARMYIKQVMRIAEEEFKLEVVYGDTDSLFVVIPPEKRELAQKFLQKVNESMPGIIELEFEGFYRRGLFVTKKRYALLSEDGKMVVKGLEFVRRDWAPIARETQKEVLRILLEEADPEKAARLVRDVIERIRQRRVSLEDITIYTQLTKRIKSYKSLEPHVVAAQKLKERGREVAPGMIIGYIITKGTKGISQRATPVEFARLEDYDPEYYIDNQILPAIQRIFEAIGYTRDYLKEGITQTSLSRWF

SEQ ID NO: 2748 - protein, 792 aa, unidentified
  REGION 1..792: note = Description of Unknown: Synthetic polypeptide
MPRILKGFLIDADFETVEGRALIRLFLRGEEGSFVVYDDSFSPYFYALPGDEPERVKERILASGAAEAIQKVEIEEKRLFGTPRVALRITVSHPQDVPRIRERIRRVEGVDLILEHDILFVRRRLIDRGIIPLTWLRLEVEERDGRALLRGVEQLEEEPPELRVAAVAIAVYNPKGAPRSSKDEIIMISVATSDGVEKVLTWREVQGLEQVEVLQDEKEMLLRFAELIKEGDYDVIVGYNTDSFDFPYIRDRLKKLGISLPLGRLDAELEVSRRGALPEARIRGRAHVDLYPIVRRHVKLNSYDLESVVEELLGIKKEKLDGERLFTYWDEGGEKRALLARYALEDARVTLALAEKFLPLYCELSTIVGQSLNDVARMTSGQLVEWLLMRYATPRGELIPNHPAGEEYAARARATYAGGYVREPKRGLVEHIAVFDFRSFGPSIIVSHNIDPSTLIVGNCEENRAPELEYCFSLEREGFIPAILKELIRRRAEIKRELKRSEGDRRRTLSFAEKALKILANSFYGYMGYPRARWYRRECAESVAAFARMYIKQVMRIAEEEFKLEVVYGDTDSLFVVIPPEKRELAQKFLQKVNESMPGIIELEFEGFYRRGLFVTKKRYALLSEDGKMVVKGLEFVRRDWAPIARETQKEVLRILLEEADPEKAARLVRDVIERIRQRRVSLEDITIYTQLTKRIKSYKSLEPHVVAAQKLKERGREVAPGMIIGYIITKGTKGISQRATPVEFARLEDYDPEYYIDNQILPAIQRIFEAIGYTRDYLKEGITQTSLSRWF

SEQ ID NO: 2749 - protein, 792 aa, unidentified
  REGION 1..792: note = Description of Unknown: Synthetic polypeptide
MPRILKGFLIDADFETVEGRALIRLFLRGEEGSFVVYDDSFSPYFYADPGDEPERVKERILASGAAEAIQKVEIEEKRLFGTPRVALRITVSHPQDVPRIRERIRRVEGVDLILEHDILFVRRRLIDRGIKPLTWLRLEVEERDGRALLRGVEQLEEEPPELRVAAVAIAVYNPKGAPRSSKDEIIMISVATSDGVEKVLTWREVQGLEQVEVLQDEKEMLLRFAELIKEGDYDVIVGYNTDSFDFPYIRDRLKKLGISLPLGRLDAELEVSRRGALPEARIRGRAHVDLYPIVRRHVKLNTYDLESVVEELLGIKKEKLDGERLFTYWDEGGEKRALLARYALEDARVTLALAEKFLPLYCELSTIVGQSLNDVARMTSGQLVEWLLMRYATPRGELIPNHPAGEEYAARARATYAGGYVREPKRGLVEHIAVFDFRSFGPSIIVSHNIDPSTLIVGNCEENRAPELEYCFSLEREGFIPAILKELIRRRAEIKRELKRSEGDRRRTLSFAEKALKILANSFYGYMGYPRARWYRRECAESVAAFARMYIKQVMRIAEEEFKLEVVYGDTDSLFVVIPPEKRELAQKFLQKVNESMPGIIELEFEGFYRRGLFVTKKRYALLSEDGKMVVKGLEFVRRDWAPIARETQKEVLRILLEEADPEKAARLVRDVIERIRQRRVSLEDITIYTQLTKRIKSYKSLEPHVVAAQKLKERGREVAPGMIIGYIITKGTKGISQRATPVEFARLEDYDPEYYIDNQILPAIQRIFEAIGYTRDYLKEGITQTSLSRWF

SEQ ID NO: 2750 - protein, 792 aa, unidentified
  REGION 1..792: note = Description of Unknown: Synthetic polypeptide
MPRILKGFLIDADFETVEGRALIRLFLRGEEGSFVVYDDSFSPYFYALPKDEPERVKERILASGAAEAIQKVEIEEKRLFGTPRVALRITVSHPQDVPRIRERIRRVEGVDLILEHDILFVRRRLIDRGIKPLTWLRLEVEERDGRALLRGVEQLEEEPPELRVAAVAIAVYNPKGAPRSSKDEIIMISVATSDGVEKVLTWREVQGLEQVEVLQDEKEMLLRFAELIKEGDYDVIVGYNTDSFDFPYIRDRLKKLGISLPLGRLDAELEVSRRGALPEARIRGRAHVDLYPIVRRHVKLNSYDLESVVEELLGIKKEKLDGERLFTYWDEGGEKRALLARYALEDARVTLALAEKFLPLYCELSTIVGQSLNDVARMTSGQLVEWLLMRYATPRGELIPNHPAGEEYAARARATYAGGYVREPKRGLVEHIAVFDFRSFGPSIIVSHNIDPSTLIVGNCEENRAPELEYCFSLEREGFIPAILKELIRRRAEIKRELKRSEGDRRRTLSFAEKALKILANSFYGYMGYPRARWYRRECAESVAAFARMYIKQVMRIAEEEFKLEVVYGDTDSLFVVIPPEKRELAQKFLQKVNESMPGIIELEFEGFYRRGLFVTKKRYALLSEDGKMVVKGLEFVRRDWAPIARETQKEVLRILLEEADPEKAARLVRDVIERIRQRRVSLEDITIYTQLTKRIKSYKSLEPHVVAAQKLKERGREVAPGMIIGYIITKGTKGISQRATPVEFARLEDYDPEYYIDNQILPAIQRIFEAIGYTRDYLKEGITQTSLSRWF

SEQ ID NO: 2751 - protein, 792 aa, unidentified
  REGION 1..792: note = Description of Unknown: Synthetic polypeptide
MPRILKGFLIDADFETVEGRALIRLFLRGEEGSFVVYDDSFSPYFYALPGDEPERVKERILASGAAEAIQKVEIEEKRFFGTPRVALRITVSHPQDVPRIRERIRRVEGVDLILEHDILFVRRRLIDRGIKPLTWLRLEVEERDGRALLRGVEQLEEEPPELRVAAVAIAVYNPKGAPRSSKDEIIMISVATSDGVEKVLTWREVQGLEQVEVLQDEKEMLLRFAELIKEGDYDVIVGYNTDSFDFPYIRDRLKKLGISLPLGRLDAELEVSRRGALPEARIRGRAHVDLYPIVRRHVKLNSYDLESVVEELLGIKKEKLDGERLFTYWDEGGEKRALLARYALEDARVTLALAEKFLPLYCELSTIVGQSLNDVARMTSGQLVEWLLMRYATPRGELIPNHPAGEEYAARARATYAGGYVREPKRGLVEHIAVFDFRSFGPSIIVSHNIDPSTLIVGNCEENRAPELEYCFSLEREGFIPAILKELIRRRAEIKRELKRSEGDRRRTLSFAEKALKILANSFYGYMGYPRARWYRRECAESVAAFARMYIKQVMRIAEEEFKLEVVYGDTDSLFVVIPPEKRELAQKFLQKVNESMPGIIELEFEGFYRRGLFVTKKRYALLSEDGKMVVKGLEFVRRDWAPIARETQKEVLRILLEEADPEKAARLVRDVIERIRQRRVSLEDITIYTQLTKRIKSYKSLEPHVVAAQKLKERGREVAPGMIIGYIITKGTKGISQRATPVEFARLEDYDPEYYIDNQILPAIQRIFEAIGYTRDYLKEGITQTSLSRWF

SEQ ID NO: 2752 - protein, 792 aa, unidentified
  REGION 1..792: note = Description of Unknown: Synthetic polypeptide
MPRILKGFLIDADFETVEGRALIRLFLRGEEGSFVVYDDSFSPYFYALPGDEPERVKERILASGAAEAIQKVEIEEKRLFGTPRVALRITVSHPQDVPRIRERIRRVEGVDLILEHDILFVRRRLIDRGIKPLTWLRLEVEERDGRALLRGVEQLEEEPPELRVAAVAIAVYNPKGAPRSSKDEIIMISVATSDGVEKVLTWREVQGLEQVEVLQDEKEMLLRFAELIKEGDYDVIVGYNTDSFDFPYIRDRLKKLGISLPLGRLDAELEVSRRGALPEARIRGRAHVDLYPIVRRHVKLPSYDLESVVEELLGIKKEKLDGERLFTYWDEGGEKRALLARYALEDARVTLALAEKFLPLYCELSTIVGQSLNDVARMTSGQLVEWLLMRYATPRGELIPNHPAGEEYAARARATYAGGYVREPKRGLVEHIAVFDFRSFGPSIIVSHNIDPSTLIVGNCEENRAPELEYCFSLEREGFIPAILKELIRRRAEIKRELKRSEGDRRRTLSFAEKALKILANSFYGYMGYPRARWYRRECAESVAAFARMYIKQVMRIAEEEFKLEVVYGDTDSLFVVIPPEKRELAQKFLQKVNESMPGIIELEFEGFYRRGLFVTKKRYALLSEDGKMVVKGLEFVRRDWAPIARETQKEVLRILLEEADPEKAARLVRDVIERIRQRRVSLEDITIYTQLTKRIKSYKSLEPHVVAAQKLKERGREVAPGMIIGYIITKGTKGISQRATPVEFARLEDYDPEYYIDNQILPAIQRIFEAIGYTRDYLKEGITQTSLSRWF

SEQ ID NO: 2753 - protein, 792 aa, unidentified
  REGION 1..792: note = Description of Unknown: Synthetic polypeptide
MPRILKGFLIDADFETVEGRALIRLFLRGEEGSFVVYDDSFSPYFYADPGDEPERVKERILASGAAEAIQKVEIEEKRLFGTPRVALRITVSHPQDVPRIRERIRRVEGVDLILEHDILFVRRRLIDRGIKPLTWLRLEVEERDGRALLRGVEQLEEEPPELRVAAVAIAVYNPKGAPRSSKDEIIMISVATSDGVEKVLTWREVQGLEQVEVLQDEKEMLLRFAELIKEGDYDVIVGYNTDSFDFPYIRDRLKKLGISLPLGRLDAELEVSRRGALPEARIRGRAHVDLYPIVRRHVKLNSYDLESVVEELLGIKKEKLDGERLFTYWDEGGEKRALLARYALEDARVTLALAEKFLPLYCELSTIVGQSLNDVARMTSGQLVEWLLLRYATPRGELIPNHPAGEEYAARARATYAGGYVREPKRGLVEHIAVFDFRSFGPSIIVSHNIDPSTLIVGNCEENRAPELEYCFSLEREGFIPAILKELIRRRAEIKRELKRSEGDRRRTLSFAEKALKILANSFYGYMGYPRARWYRRECAESVAAFARMYIKQVMRIAEEEFKLEVVYGDTDSLFVVIPPEKRELAQKFLQKVNESMPGIIELEFEGFYRRGLFVTKKRYALLSEDGKMVVKGLEFVRRDWAPIARETQKEVLRILLEEADPEKAARLVRDVIERIRQRRVSLEDITIYTQLTKRIKSYKSLEPHVVAAQKLKERGREVAPGMIIGYIITKGTKGISQRATPVEFARLEDYDPEYYIDNQILPAIQRIFEAIGYTRDYLKEGITQTSLSRWF

SEQ ID NO: 2754 - protein, 792 aa, unidentified
  REGION 1..792: note = Description of Unknown: Synthetic polypeptide
MPRILKGFLIDADFETVEGRALIRLFLRGEEGSFVVYDDSFSPYFYALPGDEPERVKERILASGAAEAIQKVEIEEKRLFGTPRVALRITVSHPQDVPRIRERIRRVEGVDLILEHDILFVRRRLIDRGIKPLTWLRLEVEERDGRALLRGVEQLEEEPPELRVAAVAIAVYNPKGAPRSSKDEIIMISVATSDGVEKVLTWREVQGLEQVEVLQDEKEMLLRFAELIKEGDYDVIVGYNTDSFDFPYIRDRLKKLGISLPLGRLDAELEVSRRGALPEARIRGRAHVDLYPIVRRHVKLNSYDLESVVEELLGIKKEKLDGERLFTYWDEGGEKRALLARYALEDARVTLALAEKFLPLYCELSTIVGQSLNDVARMTSGQLVEWLLMRYATPRGELIPNHPAGEEYAARARATYAGGYVREPKRGLVEHIAVFDFRSFYPSIIVSHNIDPSTLIVGNCEENRAPELEYCFSLEREGFIPAILKELIRRRAEIKRELKRSEGDRRRTLSFAEKALKILANSFYGYMGYPRARWYRRECAESVAAFARMYIKQVMRIAEEEFKLEVVYGDTDSLFVVIPPEKRELAQKFLQKVNESMPGIIELEFEGFYRRGLFVTKKRYALLSEDGKMVVKGLEFVRRDWAPIARETQKEVLRILLEEADPEKAARLVRDVIERIRQRRVSLEDITIYTQLTKRIKSYKSLEPHVVAAQKLKERGREVAPGMIIGYIITKGTKGISQRATPVEFARLEDYDPEYYIDNQILPAIQRIFEAIGYTRDYLKEGITQTSLSRWF

SEQ ID NO: 2755 - protein, 792 aa, unidentified
  REGION 1..792: note = Description of Unknown: Synthetic polypeptide
MPRILKGFLIDADFETVEGRALIRLFLRGEEGSFVVYDDSFSPYFYALPGDEPERVKERILASGAAEAIQKVEIEEKRLFGTPRVALRITVSHPQDVPRIRERIRRVEGVDLILEHDILFVRRRLIDRGIKPLTWDRLEVEERDGRALLRGVEQLEEEPPELRVAAVAIAVYNPKGAPRSSKDEIIMISVATSDGVEKVLTWREVQGLEQVEVLQDEKEMLLRFAELIKEGDYDVIVGYNTDSFDFPYIRDRLKKLGISLPLGRLDAELEVSRRGALPEARIRGRAHVDLYPIVRRHVKLNSYDLESVVEELLGIKKEKLDGERLFTYWDEGGEKRALLARYALEDARVTLALAEKFLPLYCELSTIVGQSLNDVARMTSGQLVEWLLMRYATPRGELIPNHPAGEEYAARARATYAGGYVREPKRGLVEHIAVFDFRSFGPSIIVSHNIDPSTLIVGNCEENRAPELEYCFSLEREGFIPAILKELIRRRAEIKRELKRSEGDRRRTLSFAEKALKILANSFYGYMGYPRARWYRRECAESVAAFARMYIKQVMRIAEEEFKLEVVYGDTDSLFVVIPPEKRELAQKFLQKVNESMPGIIELEFEGFYRRGLFVTKKRYALLSEDGKMVVKGLEFVRRDWAPIARETQKEVLRILLEEADPEKAARLVRDVIERIRQRRVSLEDITIYTQLTKRIKSYKSLEPHVVAAQKLKERGREVAPGMIIGYIITKGTKGISQRATPVEFARLEDYDPEYYIDNQILPAIQRIFEAIGYTRDYLKEGITQTSLSRWF

SEQ ID NO: 2756 - protein, 792 aa, unidentified
  REGION 1..792: note = Description of Unknown: Synthetic polypeptide
MPRILKGFLIDADFETVEGRALIRLFLRGEEGSFVVYDDSFSPYFYALPGDEPERVKERILASGAAEAIQKVEIEEKRLFGTPRVALRITVSHPQDVPRIRERIRRVEGVDLILEHDILFVRRRLIDRGIKPLTWLRLEVEERDGRALLRGVEQLEEEPPELRVAAVAIAVYNPKGAPRSSKDEIIMISVATSDGVEKVLTWREVQGLEQVEVLQDEKEMLLRFAELIKEGDYDVIVGYNTDNFDFPYIRDRLKKLGISLPLGRLDAELEVSRRGALPEARIRGRAHVDLYPIVRRHVKLNSYDLESVVEELLGIKKEKLDGERLFTYWDEGGEKRALLARYALEDARVTLALAEKFLPLYCELSTIVGQSLNDVARMTSGQLVEWLLMRYATPRGELIPNHPAGEEYAARARATYAGGYVREPKRGLVEHIAVFDFRSFGPSIIVSHNIDPSTLIVGNCEENRAPELEYCFSLEREGFIPAILKELIRRRAEIKRELKRSEGDRRRTLSFAEKALKILANSFYGYMGYPRARWYRRECAESVAAFARMYIKQVMRIAEEEFKLEVVYGDTDSLFVVIPPEKRELAQKFLQKVNESMPGIIELEFEGFYRRGLFVTKKRYALLSEDGKMVVKGLEFVRRDWAPIARETQKEVLRILLEEADPEKAARLVRDVIERIRQRRVSLEDITIYTQLTKRIKSYKSLEPHVVAAQKLKERGREVAPGMIIGYIITKGTKGISQRATPVEFARLEDYDPEYYIDNQILPAIQRIFEAIGYTRDYLKEGITQTSLSRWF

SEQ ID NO: 2757 - protein, 792 aa, unidentified
  REGION 1..792: note = Description of Unknown: Synthetic polypeptide
MPRILKGFLIDADFETVEGRALIRLFLRGEEGSFVVYDDSFSPYFYALPGDEPERVKERILASGAAEAIQKVEIEEKRLFGTPRVALRITVSHPQDVPRIRERIRRVEGVDLILEHDILFVRRRLIDRGIKPLEWLRLEVEERDGRALLRGVEQLEEEPPELRVAAVAIAVYNPKGAPRSSKDEIIMISVATSDGVEKVLTWREVQGLEQVEVLQDEKEMLLRFAELIKEGDYDVIVGYNTDSFDFPYIRDRLKKLGISLPLGRLDAELEVSRRGALPEARIRGRAHVDLYPIVRRHVKLNSYDLESVVEELLGIKKEKLDGERLFTYWDEGGEKRALLARYALEDARVTLALAEKFLPLYCELSTIVGQSLNDVARMTSGQLVEWLLMRYATPRGELIPNHPAGEEYAARARATYAGGYVREPKRGLVEHIAVFDFRSFGPSIIVSHNIDPSTLIVGNCEENRAPELEYCFSLEREGFIPAILKELIRRRAEIKRELKRSEGDRRRTLSFAEKALKILANSFYGYMGYPRARWYRRECAESVAAFARMYIKQVMRIAEEEFKLEVVYGDTDSLFVVIPPEKRELAQKFLQKVNESMPGIIELEFEGFYRRGLFVTKKRYALLSEDGKMVVKGLEFVRRDWAPIARETQKEVLRILLEEADPEKAARLVRDVIERIRQRRVSLEDITIYTQLTKRIKSYKSLEPHVVAAQKLKERGREVAPGMIIGYIITKGTKGISQRATPVEFARLEDYDPEYYIDNQILPAIQRIFEAIGYTRDYLKEGITQTSLSRWF

SEQ ID NO: 2758 - protein, 792 aa, unidentified
  REGION 1..792: note = Description of Unknown: Synthetic polypeptide
MPRILKGFLIDADFETVEGRALIRLFLRGEEGSFVEYDDSFSPYFYALPGDEPERVKERILASGAAEAIQKVEIEEKRLFGTPRVALRITVSHPQDVPRIRERIRRVEGVDLILEHDILFVRRRLIDRGIKPLTWLRLEVEERDGRALLRGVEQLEEEPPELRVAAVAIAVYNPKGAPRSSKDEIIMISVATSDGVEKVLTWREVQGLEQVEVLQDEKEMLLRFAELIKEGDYDVIVGYNTDSFDFPYIRDRLKKLGISLPLGRLDAELEVSRRGALPEARIRGRAHVDLYPIVRRHVKLNSYDLESVVEELLGIKKEKLDGERLFTYWDEGGEKRALLARYALEDARVTLALAEKFLPLYCELSTIVGQSLNDVARMTSGQLVEWLLMRYATPRGELIPNHPAGEEYAARARATYAGGYVREPKRGLVEHIAVFDFRSFGPSIIVSHNIDPSTLIVGNCEENRAPELEYCFSLEREGFIPAILKELIRRRAEIKRELKRSEGDRRRTLSFAEKALKILANSFYGYMGYPRARWYRRECAESVAAFARMYIKQVMRIAEEEFKLEVVYGDTDSLFVVIPPEKRELAQKFLQKVNESMPGIIELEFEGFYRRGLFVTKKRYALLSEDGKMVVKGLEFVRRDWAPIARETQKEVLRILLEEADPEKAARLVRDVIERIRQRRVSLEDITIYTQLTKRIKSYKSLEPHVVAAQKLKERGREVAPGMIIGYIITKGTKGISQRATPVEFARLEDYDPEYYIDNQILPAIQRIFEAIGYTRDYLKEGITQTSLSRWF

SEQ ID NO: 2759 - protein, 792 aa, unidentified
  REGION 1..792: note = Description of Unknown: Synthetic polypeptide
MPRILKGFLIDADFETVEGRALIRLFLRGEEGSFVVYDDSFSPYFYALPGDEPERVKERILASGAAEAIQKVEIEEKRLFGTPRVALRITVSHPQDVPRIRERIRRVEGVDLILEHDILFVRRRLIDRGIKPLTWLRLEVEERDGRALLRGVEQLEEEPPELRVAAVAIAVYNPKGAPRSSKDEIIMISVATSDGVEKVLTWREVQGLEQVEVLSDEKEMLLRFAELIKEGDYDVIVGYNTDSFDFPYIRDRLKKLGISLPLGRLDAELEVSRRGALPEARIRGRAHVDLYPIVRRHVKLNSYDLESVVEELLGIKKEKLDGERLFTYWDEGGEKRALLARYALEDARVTLALAEKFLPLYCELSTIVGQSLNDVARMTSGQLVEWLLMRYATPRGELIPNHPAGEEYAARARATYAGGYVREPKRGLVEHIAVFDFRSFGPSIIVSHNIDPSTLIVGNCEENRAPELEYCFSLEREGFIPAILKELIRRRAEIKRELKRSEGDRRRTLSFAEKALKILANSFYGYMGYPRARWYRRECAESVAAFARMYIKQVMRIAEEEFKLEVVYGDTDSLFVVIPPEKRELAQKFLQKVNESMPGIIELEFEGFYRRGLFVTKKRYALLSEDGKMVVKGLEFVRRDWAPIARETQKEVLRILLEEADPEKAARLVRDVIERIRQRRVSLEDITIYTQLTKRIKSYKSLEPHVVAAQKLKERGREVAPGMIIGYIITKGTKGISQRATPVEFARLEDYDPEYYIDNQILPAIQRIFEAIGYTRDYLKEGITQTSLSRWF

SEQ ID NO: 2760 - protein, 792 aa, unidentified
  REGION 1..792: note = Description of Unknown: Synthetic polypeptide
MPRILKGFLIDADFETVEGRALIRLFLRGEEGSFVVYDDSFSPYFYALPGDEPERVKERILASGAAEAIQKVEIEEKRLFGTPRVALRITVSHPQDVPRIRERIRRVEGVDLILEHDILFVRRRLIDRGIKPLTWLRLEVEERDGRALLRGVEQLEEEPPELRVAAVAIAVYNPKGAPRSSKDEIIMISVATSDGVEKVLTWREVQDLEQVEVLQDEKEMLLRFAELIKEGDYDVIVGYNTDSFDFPYIRDRLKKLGISLPLGRLDAELEVSRRGALPEARIRGRAHVDLYPIVRRHVKLNSYDLESVVEELLGIKKEKLDGERLFTYWDEGGEKRALLARYALEDARVTLALAEKFLPLYCELSTIVGQSLNDVARMTSGQLVEWLLMRYATPRGELIPNHPAGEEYAARARATYAGGYVREPKRGLVEHIAVFDFRSFGPSIIVSHNIDPSTLIVGNCEENRAPELEYCFSLEREGFIPAILKELIRRRAEIKRELKRSEGDRRRTLSFAEKALKILANSFYGYMGYPRARWYRRECAESVAAFARMYIKQVMRIAEEEFKLEVVYGDTDSLFVVIPPEKRELAQKFLQKVNESMPGIIELEFEGFYRRGLFVTKKRYALLSEDGKMVVKGLEFVRRDWAPIARETQKEVLRILLEEADPEKAARLVRDVIERIRQRRVSLEDITIYTQLTKRIKSYKSLEPHVVAAQKLKERGREVAPGMIIGYIITKGTKGISQRATPVEFARLEDYDPEYYIDNQILPAIQRIFEAIGYTRDYLKEGITQTSLSRWF

SEQ ID NO: 2761 - protein, 792 aa, unidentified
  REGION 1..792: note = Description of Unknown: Synthetic polypeptide
MPRILKGFLIDADYETVEGRALIRLFLRGEEGSFVVYDDSFSPYFYALPGDEPERVKERILASGAAEAIQKVEIEEKRLFGTPRVALRITVSHPQDVPRIRERIRRVEGVDLILEHDILFVRRYLIDRGIKPLTWLRLEVEERDGRALLRGVEQLEEEPPELRVAAVDIEVYNPKGAPRSSKDEIIMISVATSDGVEKVLTWREVQGLEQVEVLQDEKEMLLRFAELIKEGDYDVIVGYNTDSFDFPYIRDRLKKLGISLPLGRLDAELEVSRRGALPEARIRGRAHVDLYPIVRRHVKLNSYDLESVVEELLGIKKEKLDGERLFTYWDEGGEKRALLARYALEDARVTLALAEKFLPLYCELSTIVGQSLNDVARMTSGQLVEWLLMRYATPRGELIPNHPAGEEYAARARATYAGGYVREPKRGLVEHIAVFDFRSLYPSIIVSHNIDPSTLIVGNCEENRAPELEYCFSLEREGFIPAILKELIRRRAEIKRELKRSEGDRRRTLSFAEKALKILANSFYGYMGYPRARWYRRECAESVAAFARMYIKQVMRIAEEEFKLEVVYGDTDSLFVVIPPEKRELAQKFLQKVNESMPGIIELEFEGFYRRGLFVTKKRYALLSEDGKMVVKGLEFVRRDWAPIARETQKEVLRILLEEADPEKAARLVRDVIERIRQRRVSLEDITIYTQLTKRIKSYKSLEPHVVAAQKLKERGREVAPGMIIGYIITKGTKGISQRATPVEFARLEDYDPEYYIDNQILPAIQRIFEAIGYTRDYLKEGITQTSLSRWF

SEQ ID NO: 2762 - protein, 792 aa, unidentified
  REGION 1..792: note = Description of Unknown: Synthetic polypeptide
MPRILKGFLIDADFETVEGRALIRLFLRGEEGSFVVYDDSFSPYFYALPGDEPERVKERILASGAAEAIQKVEIEEKRLFGTPRVALRITVSHPQDVPRIRERIRRVEGVDLILEHDILFVRRRLIDRGIKPLTWLRLEVEERDGRALLRGVEQLEEEPPELRVAAVAIAVYNPKGAPRSSKDEIIMISVATEDGVEKVLTWREVQGLEQVEVLQDEKEMLLRFAELIKEGDYDVIVGYNTDSFDFPYIRDRLKKLGISLPLGRLDAELEVSRRGALPEARIRGRAHVDLYPIVRRHVKLNSYDLESVVEELLGIKKEKLDGERLFTYWDEGGEKRALLARYALEDARVTLALAEKFLPLYCELSTIVGQSLNDVARMTSGQLVEWLLMRYATPRGELIPNHPAGEEYAARARATYAGGYVREPKRGLVEHIAVFDFRSFGPSIIVSHNIDPSTLIVGNCEENRAPELEYCFSLEREGFIPAILKELIRRRAEIKRELKRSEGDRRRTLSFAEKALKILANSFYGYMGYPRARWYRRECAESVAAFARMYIKQVMRIAEEEFKLEVVYGDTDSLFVVIPPEKRELAQKFLQKVNESMPGIIELEFEGFYRRGLFVTKKRYALLSEDGKMVVKGLEFVRRDWAPIARETQKEVLRILLEEADPEKAARLVRDVIERIRQRRVSLEDITIYTQLTKRIKSYKSLEPHVVAAQKLKERGREVAPGMIIGYIITKGTKGISQRATPVEFARLEDYDPEYYIDNQILPAIQRIFEAIGYTRDYLKEGITQTSLSRWF

SEQ ID NO: 2763 - protein, 792 aa, unidentified
  REGION 1..792: note = Description of Unknown: Synthetic polypeptide
MPRILKGFLIDADFITVEGRALIRLFLRGEEGSFVVYDDSFSPYFYALPGDEPERVKERILASGAAEAIQKVEIEEKRLFGTPRVALRITVSHPQDVPRIRERIRRVEGVDLILEHDILFVRRRLIDRGIKPLTWLRLEVEERDGRALLRGVEQLEEEPPELRVAAVAIAVYNPKGAPRSSKDEIIMISVATSDGVEKVLTWREVQGLEQVEVLQDEKEMLLRFAELIKEGDYDVIVGYNTDSFDFPYIRDRLKKLGISLPLGRLDAELEVSRRGALPEARIRGRAHVDLYPIVRRHVKLNSYDLESVVEELLGIKKEKLDGERLFTYWDEGGEKRALLARYALEDARVTLALAEKFLPLYCELSTIVGQSLNDVARMTSGQLVEWLLMRYATPRGELIPNHPAGEEYAARARATYAGGYVREPKRGLVEHIAVFDFRSFGPSIIVSHNIDPSTLIVGNCEENRAPELEYCFSLEREGFIPAILKELIRRRAEIKRELKRSEGDRRRTLSFAEKALKILANSFYGYMGYPRARWYRRECAESVAAFARMYIKQVMRIAEEEFKLEVVYGDTDSLFVVIPPEKRELAQKFLQKVNESMPGIIELEFEGFYRRGLFVTKKRYALLSEDGKMVVKGLEFVRRDWAPIARETQKEVLRILLEEADPEKAARLVRDVIERIRQRRVSLEDITIYTQLTKRIKSYKSLEPHVVAAQKLKERGREVAPGMIIGYIITKGTKGISQRATPVEFARLEDYDPEYYIDNQILPAIQRIFEAIGYTRDYLKEGITQTSLSRWF

SEQ ID NO: 2764 - protein, 792 aa, unidentified
  REGION 1..792: note = Description of Unknown: Synthetic polypeptide
MPRILKGFLIDADFETVEGRALIRLFLRGEEGSFVVYDDSFSPYFYALPGDEPERVKERILASGAAERIQKVEIEEKRLFGTPRVALRITVSHPQDVPRIRERIRRVEGVDLILEHDILFVRRRLIDRGIKPLTWLRLEVEERDGRALLRGVEQLEEEPPELRVAAVAIAVYNPKGAPRSSKDEIIMISVATSDGVEKVLTWREVQGLEQVEVLQDEKEMLLRFAELIKEGDYDVIVGYNTDSFDFPYIRDRLKKLGISLPLGRLDAELEVSRRGALPEARIRGRAHVDLYPIVRRHVKLNSYDLESVVEELLGIKKEKLDGERLFTYWDEGGEKRALLARYALEDARVTLALAEKFLPLYCELSTIVGQSLNDVARMTSGQLVEWLLMRYATPRGELIPNHPAGEEYAARARATYAGGYVREPKRGLVEHIAVFDFRSFGPSIIVSHNIDPSTLIVGNCEENRAPELEYCFSLEREGFIPAILKELIRRRAEIKRELKRSEGDRRRTLSFAEKALKILANSFYGYMGYPRARWYRRECAESVAAFARMYIKQVMRIAEEEFKLEVVYGDTDSLFVVIPPEKRELAQKFLQKVNESMPGIIELEFEGFYRRGLFVTKKRYALLSEDGKMVVKGLEFVRRDWAPIARETQKEVLRILLEEADPEKAARLVRDVIERIRQRRVSLEDITIYTQLTKRIKSYKSLEPHVVAAQKLKERGREVAPGMIIGYIITKGTKGISQRATPVEFARLEDYDPEYYIDNQILPAIQRIFEAIGYTRDYLKEGITQTSLSRWF

SEQ ID NO: 2765 - protein, 792 aa, unidentified
  REGION 1..792: note = Description of Unknown: Synthetic polypeptide
MPRILKGFLIDADFETVEGRALIRFFLRGEEGSFVVYDDSFSPYFYADPGDEPERVKERILASGAAEAIQKVEIEEKRLFGTPRVALRITVSHPQDVPRIRERIRRVEGVDLILEHDILFVRRRLIDRGIKPLTWLRLEVEERDGRALLRGVEQLEEEPPELRVAAVAIAVYNPKGAPRSSKDEIIMISVATSDGVEKVLTWREVQGLEQVEVLQDEKEMLLRFAELIKEGDYDVIVGYNTDSFDFPYIRDRLKKLGISLPLGRLDAELEVSRRGALPEARIRGRAHVDLYPIVRRHVKLNSYDLESVVEELLGIKKEKLDGERLFTYWDEGGEKRALLARYALEDARVTLALAEKFLPLYCELSTIVGQSLNDVARMTSGQLVEWLLMRYATPRGELIPNHPAGEEYAARARATYAGGYVREPKRGLVEHIAVFDFRSFGPSIIVSHNIDPSTLIVGNCEENRAPELEYCFSLEREGFIPAILKELIRRRAEIKRELKRSEGDRRRTLSFAEKALKILANSFYGYMGYPRARWYRRECAESVAAFARMYIKQVMRIAEEEFKLEVVYGDTDSLFVVIPPEKRELAQKFLQKVNESMPGIIELEFEGFYRRGLFVTKKRYALLSEDGKMVVKGLEFVRRDWAPIARETQKEVLRILLEEADPEKAARLVRDVIERIRQRRVSLEDITIYTQLTKRIKSYKSLEPHVVAAQKLKERGREVAPGMIIGYIITKGTKGISQRATPVEFARLEDYDPEYYIDNQILPAIQRIFEAIGYTRDYLKEGITQTSLSRWF

SEQ ID NO: 2766 - protein, 792 aa, unidentified
  REGION 1..792: note = Description of Unknown: Synthetic polypeptide
MPRILKGFLIDADFETVEGRALIRLFLRGEEGSFVVYDDSFSPYFYALPGDEPERVKERILASGAAEAIQKVEIEEKRLFGTPRVALRITVSHPQDVPRIRERIRRVEGVDLILEHDILFVRRRLIDRGIKPLTWLRLEVEERDGRALLRGVEQLEEEPPELRVAAVAIAVYNPKGAPRSSKDEIIMISVATSDGVEKVLTWREVQGLEYVEVLQDEKEMLLRFAELIKEGDYDVIVGYNTDSFDFPYIRDRLKKLGISLPLGRLDAELEVSRRGALPEARIRGRAHVDLYPIVRRHVKLNSYDLESVVEELLGIKKEKLDGERLFTYWDEGGEKRALLARYALEDARVTLALAEKFLPLYCELSTIVGQSLNDVARMTSGQLVEWLLMRYATPRGELIPNHPAGEEYAARARATYAGGYVREPKRGLVEHIAVFDFRSFGPSIIVSHNIDPSTLIVGNCEENRAPELEYCFSLEREGFIPAILKELIRRRAEIKRELKRSEGDRRRTLSFAEKALKILANSFYGYMGYPRARWYRRECAESVAAFARMYIKQVMRIAEEEFKLEVVYGDTDSLFVVIPPEKRELAQKFLQKVNESMPGIIELEFEGFYRRGLFVTKKRYALLSEDGKMVVKGLEFVRRDWAPIARETQKEVLRILLEEADPEKAARLVRDVIERIRQRRVSLEDITIYTQLTKRIKSYKSLEPHVVAAQKLKERGREVAPGMIIGYIITKGTKGISQRATPVEFARLEDYDPEYYIDNQILPAIQRIFEAIGYTRDYLKEGITQTSLSRWF

SEQ ID NO: 2767 - protein, 792 aa, unidentified
  REGION 1..792: note = Description of Unknown: Synthetic polypeptide
MPRILKGFLIDADFETVEGRALIRLFLRGEEGSFVVYDDSFSPYFYALPGDEPERVKERILASGAAEAIQKVEIEEKRLFGTPRVALRITVSHPQDVPRIRERIRRVEGVDLILEHDILFVRRRLIDRGIKPLTWLRLEVEERDGRALLRGVEQLEEEPPELRVAAVAIAVYNPKGAPRSSKDEIIMISVATSDGVEKVLTWREVQGLEQVEVLQDEKEMLLRFAELIKEGDYDVIVGYNGDSFDFPYIRDRLKKLGISLPLGRLDAELEVSRRGALPEARIRGRAHVDLYPIVRRHVKLNSYDLESVVEELLGIKKEKLDGERLFTYWDEGGEKRALLARYALEDARVTLALAEKFLPLYCELSTIVGQSLNDVARMTSGQLVEWLLMRYATPRGELIPNHPAGEEYAARARATYAGGYVREPKRGLVEHIAVFDFRSFGPSIIVSHNIDPSTLIVGNCEENRAPELEYCFSLEREGFIPAILKELIRRRAEIKRELKRSEGDRRRTLSFAEKALKILANSFYGYMGYPRARWYRRECAESVAAFARMYIKQVMRIAEEEFKLEVVYGDTDSLFVVIPPEKRELAQKFLQKVNESMPGIIELEFEGFYRRGLFVTKKRYALLSEDGKMVVKGLEFVRRDWAPIARETQKEVLRILLEEADPEKAARLVRDVIERIRQRRVSLEDITIYTQLTKRIKSYKSLEPHVVAAQKLKERGREVAPGMIIGYIITKGTKGISQRATPVEFARLEDYDPEYYIDNQILPAIQRIFEAIGYTRDYLKEGITQTSLSRWF

SEQ ID NO: 2768 - protein, 792 aa, unidentified
  REGION 1..792: note = Description of Unknown: Synthetic polypeptide
MPRILKGFLIDADFETVEGRALIRLFLRGEEGSFVVYDDSFEPYFYALPGDEPERVKERILASGAAEAIQKVEIEEKRLFGTPRVALRITVSHPQDVPRIRERIRRVEGVDLILEHDILFVRRRLIDRGIKPLTWLRLEVEERDGRALLRGVEQLEEEPPELRVAAVAIAVYNPKGAPRSSKDEIIMISVATSDGVEKVLTWREVQGLEQVEVLQDEKEMLLRFAELIKEGDYDVIVGYNTDSFDFPYIRDRLKKLGISLPLGRLDAELEVSRRGALPEARIRGRAHVDLYPIVRRHVKLNSYDLESVVEELLGIKKEKLDGERLFTYWDEGGEKRALLARYALEDARVTLALAEKFLPLYCELSTIVGQSLNDVARMTSGQLVEWLLMRYATPRGELIPNHPAGEEYAARARATYAGGYVREPKRGLVEHIAVFDFRSFGPSIIVSHNIDPSTLIVGNCEENRAPELEYCFSLEREGFIPAILKELIRRRAEIKRELKRSEGDRRRTLSFAEKALKILANSFYGYMGYPRARWYRRECAESVAAFARMYIKQVMRIAEEEFKLEVVYGDTDSLFVVIPPEKRELAQKFLQKVNESMPGIIELEFEGFYRRGLFVTKKRYALLSEDGKMVVKGLEFVRRDWAPIARETQKEVLRILLEEADPEKAARLVRDVIERIRQRRVSLEDITIYTQLTKRIKSYKSLEPHVVAAQKLKERGREVAPGMIIGYIITKGTKGISQRATPVEFARLEDYDPEYYIDNQILPAIQRIFEAIGYTRDYLKEGITQTSLSRWF

SEQ ID NO: 2769 - protein, 792 aa, unidentified
  REGION 1..792: note = Description of Unknown: Synthetic polypeptide
MPRILKGFLIDADFETVEGRALIRLFLRGEEGSFVVYDDSFSPYFYALPGDEPERVKERILASGAAEAIQKVEIEEKRLFGTPRVALRITVSHPQDVPRIRERIRRVEGVDLILEHDILFVRRRLIDRGIKPLTWLRLEVEERDGRALLRGVEQLEEEPPELRVAAVAIAVYNPKGAPRSSKDEIIMISVATSDGVEKVLTWREVQGLEQVEVLQTEKEMLLRFAELIKEGDYDVIVGYNTDSFDFPYIRDRLKKLGISLPLGRLDAELEVSRRGALPEARIRGRAHVDLYPIVRRHVKLNSYDLESVVEELLGIKKEKLDGERLFTYWDEGGEKRALLARYALEDARVTLALAEKFLPLYCELSTIVGQSLNDVARMTSGQLVEWLLMRYATPRGELIPNHPAGEEYAARARATYAGGYVREPKRGLVEHIAVFDFRSFGPSIIVSHNIDPSTLIVGNCEENRAPELEYCFSLEREGFIPAILKELIRRRAEIKRELKRSEGDRRRTLSFAEKALKILANSFYGYMGYPRARWYRRECAESVAAFARMYIKQVMRIAEEEFKLEVVYGDTDSLFVVIPPEKRELAQKFLQKVNESMPGIIELEFEGFYRRGLFVTKKRYALLSEDGKMVVKGLEFVRRDWAPIARETQKEVLRILLEEADPEKAARLVRDVIERIRQRRVSLEDITIYTQLTKRIKSYKSLEPHVVAAQKLKERGREVAPGMIIGYIITKGTKGISQRATPVEFARLEDYDPEYYIDNQILPAIQRIFEAIGYTRDYLKEGITQTSLSRWF

SEQ ID NO: 2770 - protein, 792 aa, unidentified
  REGION 1..792: note = Description of Unknown: Synthetic polypeptide
MPRILKGFLIDADFETVEGRALIRLFLRGEEGSFVVYDDSFSPYFYALPGDEPERVKERILASGAAEAIQKVEIEEKRLFGTPRVALRITVSHPQDVPRIRERIRRVEGVDLILEHDILFVRRRLIDRGIKPLTWLRLEVEERDGRALLRGVEQLEEEPPELRVAAVAIAVYNPKGAPRSSKDEIIMISVATSDGVEKVLTWREVQGLEQVEVLQDEKEMLLRFAELIKEGDYDVIVGYNTDSFDFPYIRDRLKKLGISLPLGRLDAELEVSRRGALPEARIRGRAHVDLYPIVRRHVKLNSYDLESVVEELLGIKKEKLDGERLFTYWDEGGEKLALLARYALEDARVTLALAEKFLPLYCELSTIVGQSLNDVARMTSGQLVEWLLMRYATPRGELIPNHPAGEEYAARARATYAGGYVREPKRGLVEHIAVFDFRSFGPSIIVSHNIDPSTLIVGNCEENRAPELEYCFSLEREGFIPAILKELIRRRAEIKRELKRSEGDRRRTLSFAEKALKILANSFYGYMGYPRARWYRRECAESVAAFARMYIKQVMRIAEEEFKLEVVYGDTDSLFVVIPPEKRELAQKFLQKVNESMPGIIELEFEGFYRRGLFVTKKRYALLSEDGKMVVKGLEFVRRDWAPIARETQKEVLRILLEEADPEKAARLVRDVIERIRQRRVSLEDITIYTQLTKRIKSYKSLEPHVVAAQKLKERGREVAPGMIIGYIITKGTKGISQRATPVEFARLEDYDPEYYIDNQILPAIQRIFEAIGYTRDYLKEGITQTSLSRWF

SEQ ID NO: 2771 - protein, 792 aa, unidentified
  REGION 1..792: note = Description of Unknown: Synthetic polypeptide
MPRILKGFLIDADFETVEGRALIRLFLRGEEGSFVVYDDSFSPYFYALPGDEPERVKERILASGAAEAIQKVEIEEKRLFGTPRVALRITVSHPQDVPRIRERIRRVEGVDLILEHDILFVRRYLIDRGIKPLTWLRLEVEERDGRALLRGVEQLEEEPPELRVAAVDIEVYNPKGAPRSSKDEIIMISVATSDGVEKVLTWREVQGLEQVEVLQDEKEMLLRFAELIKEGDYDVIVGYNTDSFDFPYIRDRLKKLGISLPLGRLDAELEVSRRGALPEARIRGRAHVDLYPIVRRHVKLNSYVLESVVEELLGIKKEKLDGERLFTYWDEGGEKRALLARYALEDARVTLALAEKFLPLYCELSTIVGQSLNDVARMTSGQLVEWLLMRYATPRGELIPNHPAGEEYAARARATYAGGYVREPKRGLVEHIAVFDFRSLYPSIIVSHNIDPSTLIVGNCEENRAPELEYCFSLEREGFIPAILKELIRRRAEIKRELKRSEGDRRRTLSFAEKALKILANSFYGYMGYPRARWYRRECAESVAAFARMYIKQVMRIAEEEFKLEVVYGDTDSLFVVIPPEKRELAQKFLQKVNESMPGIIELEFEGFYRRGLFVTKKRYALLSEDGKMVVKGLEFVRRDWAPIARETQKEVLRILLEEADPEKAARLVRDVIERIRQRRVSLEDITIYTQLTKRIKSYKSLEPHVVAAQKLKERGREVAPGMIIGYIITKGTKGISQRATPVEFARLEDYDPEYYIDNQILPAIQRIFEAIGYTRDYLKEGITQTSLSRWF

SEQ ID NO: 2772 - protein, 792 aa, unidentified
  REGION 1..792: note = Description of Unknown: Synthetic polypeptide
MPRILKGFLIDADFETVEGRALIRLFLRGEEGSFVVYDDSFSPYFYADPGDEPERVKERILASGAAEAIQKVEIEEKRLFGTPRVALRITVSHPQDVPRIRERIRRVEGVDLILEHDILFVRRRLIDRGIKPLTWLRLEVEERDGRALLRGVEQLEEEPPELRVAAVAIAVYNPKGAPRSSKDEINMISVATSDGVEKVLTWREVQGLEQVEVLQDEKEMLLRFAELIKEGDYDVIVGYNTDSFDFPYIRDRLKKLGISLPLGRLDAELEVSRRGALPEARIRGRAHVDLYPIVRRHVKLNSYDLESVVEELLGIKKEKLDGERLFTYWDEGGEKRALLARYALEDARVTLALAEKFLPLYCELSTIVGQSLNDVARMTSGQLVEWLLMRYATPRGELIPNHPAGEEYAARARATYAGGYVREPKRGLVEHIAVFDFRSFGPSIIVSHNIDPSTLIVGNCEENRAPELEYCFSLEREGFIPAILKELIRRRAEIKRELKRSEGDRRRTLSFAEKALKILANSFYGYMGYPRARWYRRECAESVAAFARMYIKQVMRIAEEEFKLEVVYGDTDSLFVVIPPEKRELAQKFLQKVNESMPGIIELEFEGFYRRGLFVTKKRYALLSEDGKMVVKGLEFVRRDWAPIARETQKEVLRILLEEADPEKAARLVRDVIERIRQRRVSLEDITIYTQLTKRIKSYKSLEPHVVAAQKLKERGREVAPGMIIGYIITKGTKGISQRATPVEFARLEDYDPEYYIDNQILPAIQRIFEAIGYTRDYLKEGITQTSLSRWF

SEQ ID NO: 2773 - protein, 792 aa, unidentified
  REGION 1..792: note = Description of Unknown: Synthetic polypeptide
MPRILKGFLIDADFETVEGRALIRLFLRGEEGSFVVYDDSFSPYFYALPGDEPERVKERILASGAAEAIQKVEIEEKRLFGTPRVALRITVSHPQDVPRIRERIRRVEGVDLILEHDILFVRRRLIDRGIKPLTWLRLEVEERDGRALLRGVEQLEEEPPELRVAAVAIAVYNPKGAPRSSKDEIIMISVATSDGVEKVLTWREVQGLEQVEVLQDEKEMLKRFAELIKEGDYDVIVGYNTDSFDFPYIRDRLKKLGISLPLGRLDAELEVSRRGALPEARIRGRAHVDLYPIVRRHVKLNSYDLESVVEELLGIKKEKLDGERLFTYWDEGGEKRALLARYALEDARVTLALAEKFLPLYCELSTIVGQSLNDVARMTSGQLVEWLLMRYATPRGELIPNHPAGEEYAARARATYAGGYVREPKRGLVEHIAVFDFRSFGPSIIVSHNIDPSTLIVGNCEENRAPELEYCFSLEREGFIPAILKELIRRRAEIKRELKRSEGDRRRTLSFAEKALKILANSFYGYMGYPRARWYRRECAESVAAFARMYIKQVMRIAEEEFKLEVVYGDTDSLFVVIPPEKRELAQKFLQKVNESMPGIIELEFEGFYRRGLFVTKKRYALLSEDGKMVVKGLEFVRRDWAPIARETQKEVLRILLEEADPEKAARLVRDVIERIRQRRVSLEDITIYTQLTKRIKSYKSLEPHVVAAQKLKERGREVAPGMIIGYIITKGTKGISQRATPVEFARLEDYDPEYYIDNQILPAIQRIFEAIGYTRDYLKEGITQTSLSRWF

SEQ ID NO: 2774 - protein, 792 aa, unidentified
  REGION 1..792: note = Description of Unknown: Synthetic polypeptide
MPRILKGFLIDADFETVEGRALIRLFLRGEEGSFVVYDDSFSPYFYALPGDEPERVKERILASGAAEAIQKVEIEEKRLFGTPRVALRITVSHPQDVPRIRERIRRVEGVDLILEHDILFVRRRLIDRGIKPLTWLRLEVEERDGRALLRGVEQLEEEPPELRVAAVAIAVYNPKGAPRSSKDEIIMISVATSDGVEKVLTWREVQGLEQVEVLQDEKEMLLRFAELIKEGDYDVIVGYNTDSFDFPYIRDRLKKLGISLPLGRLGAELEVSRRGALPEARIRGRAHVDLYPIVRRHVKLNSYDLESVVEELLGIKKEKLDGERLFTYWDEGGEKRALLARYALEDARVTLALAEKFLPLYCELSTIVGQSLNDVARMTSGQLVEWLLMRYATPRGELIPNHPAGEEYAARARATYAGGYVREPKRGLVEHIAVFDFRSFGPSIIVSHNIDPSTLIVGNCEENRAPELEYCFSLEREGFIPAILKELIRRRAEIKRELKRSEGDRRRTLSFAEKALKILANSFYGYMGYPRARWYRRECAESVAAFARMYIKQVMRIAEEEFKLEVVYGDTDSLFVVIPPEKRELAQKFLQKVNESMPGIIELEFEGFYRRGLFVTKKRYALLSEDGKMVVKGLEFVRRDWAPIARETQKEVLRILLEEADPEKAARLVRDVIERIRQRRVSLEDITIYTQLTKRIKSYKSLEPHVVAAQKLKERGREVAPGMIIGYIITKGTKGISQRATPVEFARLEDYDPEYYIDNQILPAIQRIFEAIGYTRDYLKEGITQTSLSRWF

SEQ ID NO: 2775 - protein, 792 aa, unidentified
  REGION 1..792: note = Description of Unknown: Synthetic polypeptide
MPRILKGFLIDADFETVEGRALIRLFLRGEEGSFVVYDDSFSPYFYALPGDEPERVKERILASGAAEAIQKVEIEEKRLFGTPRVALRITVSHPQDVPRIRERIRRVEGVDLILEHDILFVRRRLIDKGIKPLTWLRLEVEERDGRALLRGVEQLEEEPPELRVAAVAIAVYNPKGAPRSSKDEIIMISVATSDGVEKVLTWREVQGLEQVEVLQDEKEMLLRFAELIKEGDYDVIVGYNTDSFDFPYIRDRLKKLGISLPLGRLDAELEVSRRGALPEARIRGRAHVDLYPIVRRHVKLNSYDLESVVEELLGIKKEKLDGERLFTYWDEGGEKRALLARYALEDARVTLALAEKFLPLYCELSTIVGQSLNDVARMTSGQLVEWLLMRYATPRGELIPNHPAGEEYAARARATYAGGYVREPKRGLVEHIAVFDFRSFGPSIIVSHNIDPSTLIVGNCEENRAPELEYCFSLEREGFIPAILKELIRRRAEIKRELKRSEGDRRRTLSFAEKALKILANSFYGYMGYPRARWYRRECAESVAAFARMYIKQVMRIAEEEFKLEVVYGDTDSLFVVIPPEKRELAQKFLQKVNESMPGIIELEFEGFYRRGLFVTKKRYALLSEDGKMVVKGLEFVRRDWAPIARETQKEVLRILLEEADPEKAARLVRDVIERIRQRRVSLEDITIYTQLTKRIKSYKSLEPHVVAAQKLKERGREVAPGMIIGYIITKGTKGISQRATPVEFARLEDYDPEYYIDNQILPAIQRIFEAIGYTRDYLKEGITQTSLSRWF

SEQ ID NO: 2776 - protein, 792 aa, unidentified
  REGION 1..792: note = Description of Unknown: Synthetic polypeptide
MPRILKGFLIDADYETVEGRALIRLFLRGEEGSFVVYDDSFSPYFYALPGDEPERVKERILASGAAEAIQKVEIEEKRLFGTPRVALRITVSHPQDVPRIRERIRRVEGVDLILEHDILFVRRYLIDRGIKPLTWLRLEVEERDGRALLRGVEQLEEEPPELRVAAVDIEVYNPKGAPRSSKDEIIMISVATSDGVEKVLTWREVQGLEQVEVLQDEKEMLLRFAELIKEGDYDVIVGYNTDSFDFPYIRDRLKKLGISLPLGRLDAELEVSRRGALPEARIRGRAHVDLYPIVRRHVKLNSYVLESVVEELLGIKKEKLDGERLFTYWDEGGEKRALLARYALEDARVTLALAEKFLPLYCELSTIVGQSLNDVARMTSGQLVEWLLMRYATPRGELIPNHPAGEEYAARARATYAGGYVREPKRGLVEHIAVFDFRSFYPSIIVSHNIDPSTLIVGNCEENRAPELEYCFSLEREGFIPAILKELIRRRAEIKRELKRSEGDRRRTLSFAEKALKILANSFYGYMGYPRARWYRRECAESVAAFARMYIKQVMRIAEEEFKLEVVYGDTDSLFVVIPPEKRELAQKFLQKVNESMPGIIELEFEGFYRRGLFVTKKRYALLSEDGKMVVKGLEFVRRDWAPIARETQKEVLRILLEEADPEKAARLVRDVIERIRQRRVSLEDITIYTQLTKRIKSYKSLEPHVVAAQKLKERGREVAPGMIIGYIITKGTKGISQRATPVEFARLEDYDPEYYIDNQILPAIQRIFEAIGYTRDYLKEGITQTSLSRWF

SEQ ID NO: 2777 - protein, 792 aa, unidentified
  REGION 1..792: note = Description of Unknown: Synthetic polypeptide
MPRILKGFLIDADFETVEGRALIRLFLRGEEGSFVVYDDSFSPYFYALPGDEPERVKERILASGAAEAIQKVEIEEKRLFGTPRVALRITVSHPQDVPRIRERIRRVEGVDLILEHDILFVRRRLIDRGIKPLTWLRLEVEERDGRALLRGVEQLEEEPPELRVAAVAIAVYNPKGAPRSSKDEINMISVATSDGVEKVLTWREVQGLEQVEVLQDEKEMLLRFAELIKEGDYDVIVGYNTDSFDFPYIRDRLKKLGISLPLGRLDAELEVSRRGALPEARIRGRAHVDLYPIVRRHVKLNSYDLESVVEELLGIKKEKLDGERLFTYWDEGGEKRALLARYALEDARVTLALAEKFLPLYCELSTIVGQSLNDVARMTSGQLVEWLLMRYATPRGELIPNHPAGEEYAARARATYAGGYVREPKRGLVEHIAVFDFRSFGPSIIVSHNIDPSTLIVGNCEENRAPELEYCFSLEREGFIPAILKELIRRRAEIKRELKRSEGDRRRTLSFAEKALKILANSFYGYMGYPRARWYRRECAESVAAFARMYIKQVMRIAEEEFKLEVVYGDTDSLFVVIPPEKRELAQKFLQKVNESMPGIIELEFEGFYRRGLFVTKKRYALLSEDGKMVVKGLEFVRRDWAPIARETQKEVLRILLEEADPEKAARLVRDVIERIRQRRVSLEDITIYTQLTKRIKSYKSLEPHVVAAQKLKERGREVAPGMIIGYIITKGTKGISQRATPVEFARLEDYDPEYYIDNQILPAIQRIFEAIGYTRDYLKEGITQTSLSRWF

SEQ ID NO: 2778 - protein, 792 aa, unidentified
  REGION 1..792: note = Description of Unknown: Synthetic polypeptide
MPRILKGFLIDADFETVEGRALIRLFLRGEEGSFVVYDDSFSPYFYALPGDEPERVKERILASGAAEAIQKVEIEEKRLFGTPRVALRITVSHPQDVPRIRERIRRVEGVDLILEHDILFVRRRLIDRGIKPLTWLRLEVEERDGRALLRGVEQLEEEPPELRVAAVAIAVYNPKGAPRSSKDEIIMISVATSDGVAKVLTWREVQGLEQVEVLQDEKEMLLRFAELIKEGDYDVIVGYNTDSFDFPYIRDRLKKLGISLPLGRLDAELEVSRRGALPEARIRGRAHVDLYPIVRRHVKLNSYDLESVVEELLGIKKEKLDGERLFTYWDEGGEKRALLARYALEDARVTLALAEKFLPLYCELSTIVGQSLNDVARMTSGQLVEWLLMRYATPRGELIPNHPAGEEYAARARATYAGGYVREPKRGLVEHIAVFDFRSFGPSIIVSHNIDPSTLIVGNCEENRAPELEYCFSLEREGFIPAILKELIRRRAEIKRELKRSEGDRRRTLSFAEKALKILANSFYGYMGYPRARWYRRECAESVAAFARMYIKQVMRIAEEEFKLEVVYGDTDSLFVVIPPEKRELAQKFLQKVNESMPGIIELEFEGFYRRGLFVTKKRYALLSEDGKMVVKGLEFVRRDWAPIARETQKEVLRILLEEADPEKAARLVRDVIERIRQRRVSLEDITIYTQLTKRIKSYKSLEPHVVAAQKLKERGREVAPGMIIGYIITKGTKGISQRATPVEFARLEDYDPEYYIDNQILPAIQRIFEAIGYTRDYLKEGITQTSLSRWF

SEQ ID NO: 2779 - protein, 792 aa, unidentified
  REGION 1..792: note = Description of Unknown: Synthetic polypeptide
MPRILKGFLIDADFETVEGRALIRLFLRGEEGSFVVYDDSFSPYFYALPGDEPERVKERILASGAAEAIQKVEIEEKRLFGTPRVALRITVSHPQDVPRIRERIRRVEGVDLILEHDILFVRRRLIDRGIKPLTWLRLEVEERDGRALLRGVEQLEEEPPELHVAAVAIAVYNPKGAPRSSKDEIIMISVATSDGVEKVLTWREVQGLEQVEVLQDEKEMLLRFAELIKEGDYDVIVGYNTDSFDFPYIRDRLKKLGISLPLGRLDAELEVSRRGALPEARIRGRAHVDLYPIVRRHVKLNSYDLESVVEELLGIKKEKLDGERLFTYWDEGGEKRALLARYALEDARVTLALAEKFLPLYCELSTIVGQSLNDVARMTSGQLVEWLLMRYATPRGELIPNHPAGEEYAARARATYAGGYVREPKRGLVEHIAVFDFRSFGPSIIVSHNIDPSTLIVGNCEENRAPELEYCFSLEREGFIPAILKELIRRRAEIKRELKRSEGDRRRTLSFAEKALKILANSFYGYMGYPRARWYRRECAESVAAFARMYIKQVMRIAEEEFKLEVVYGDTDSLFVVIPPEKRELAQKFLQKVNESMPGIIELEFEGFYRRGLFVTKKRYALLSEDGKMVVKGLEFVRRDWAPIARETQKEVLRILLEEADPEKAARLVRDVIERIRQRRVSLEDITIYTQLTKRIKSYKSLEPHVVAAQKLKERGREVAPGMIIGYIITKGTKGISQRATPVEFARLEDYDPEYYIDNQILPAIQRIFEAIGYTRDYLKEGITQTSLSRWF

SEQ ID NO: 2780 - protein, 792 aa, unidentified
  REGION 1..792: note = Description of Unknown: Synthetic polypeptide
MPRILKGFLIDADFETVEGRALIRLFLRGEEGSFVVYDDSFSPYFYALPGDEPERVKERILASGAAEAIQKVEIEEKRLFGTPRVALRITFSHPQDVPRIRERIRRVEGVDLILEHDILFVRRRLIDRGIKPLTWLRLEVEERDGRALLRGVEQLEEEPPELRVAAVAIAVYNPKGAPRSSKDEIIMISVATSDGVEKVLTWREVQGLEQVEVLQDEKEMLLRFAELIKEGDYDVIVGYNTDSFDFPYIRDRLKKLGISLPLGRLDAELEVSRRGALPEARIRGRAHVDLYPIVRRHVKLNSYDLESVVEELLGIKKEKLDGERLFTYWDEGGEKRALLARYALEDARVTLALAEKFLPLYCELSTIVGQSLNDVARMTSGQLVEWLLMRYATPRGELIPNHPAGEEYAARARATYAGGYVREPKRGLVEHIAVFDFRSFGPSIIVSHNIDPSTLIVGNCEENRAPELEYCFSLEREGFIPAILKELIRRRAEIKRELKRSEGDRRRTLSFAEKALKILANSFYGYMGYPRARWYRRECAESVAAFARMYIKQVMRIAEEEFKLEVVYGDTDSLFVVIPPEKRELAQKFLQKVNESMPGIIELEFEGFYRRGLFVTKKRYALLSEDGKMVVKGLEFVRRDWAPIARETQKEVLRILLEEADPEKAARLVRDVIERIRQRRVSLEDITIYTQLTKRIKSYKSLEPHVVAAQKLKERGREVAPGMIIGYIITKGTKGISQRATPVEFARLEDYDPEYYIDNQILPAIQRIFEAIGYTRDYLKEGITQTSLSRWF

SEQ ID NO: 2781 - protein, 792 aa, unidentified
  REGION 1..792: note = Description of Unknown: Synthetic polypeptide
MPRILKGFLIDADFETVEGRALIRLFLRGEEGSFVVYDDSFSPYFYALPGDEPERVKERILASGAAEAIQKVEIEEKRLFGTPRVALRITVSHPQDVPRIRERIRRVEGVDLILEHDILFVRRCLIDRGIKPLTWLRLEVEERDGRALLRGVEQLEEEPPELRVAAVAIAVYNPKGAPRSSKDEIIMISVATSDGVEKVLTWREVQGLEQVEVLQDEKEMLLRFAELIKEGDYDVIVGYNTDSFDFPYIRDRLKKLGISLPLGRLDAELEVSRRGALPEARIRGRAHVDLYPIVRRHVKLNSYDLESVVEELLGIKKEKLDGERLFTYWDEGGEKRALLARYALEDARVTLALAEKFLPLYCELSTIVGQSLNDVARMTSGQLVEWLLMRYATPRGELIPNHPAGEEYAARARATYAGGYVREPKRGLVEHIAVFDFRSFGPSIIVSHNIDPSTLIVGNCEENRAPELEYCFSLEREGFIPAILKELIRRRAEIKRELKRSEGDRRRTLSFAEKALKILANSFYGYMGYPRARWYRRECAESVAAFARMYIKQVMRIAEEEFKLEVVYGDTDSLFVVIPPEKRELAQKFLQKVNESMPGIIELEFEGFYRRGLFVTKKRYALLSEDGKMVVKGLEFVRRDWAPIARETQKEVLRILLEEADPEKAARLVRDVIERIRQRRVSLEDITIYTQLTKRIKSYKSLEPHVVAAQKLKERGREVAPGMIIGYIITKGTKGISQRATPVEFARLEDYDPEYYIDNQILPAIQRIFEAIGYTRDYLKEGITQTSLSRWF

SEQ ID NO: 2782 - protein, 792 aa, unidentified
  REGION 1..792: note = Description of Unknown: Synthetic polypeptide
MPRILKGFLIDADFETVEGRALIRLFLRGEEGSFVVYDDSFSPYFYALPGDEPERVKERILASGAAEAVQKVEIEEKRLFGTPRVALRITVSHPQDVPRIRERIRRVEGVDLILEHDILFVRRRLIDRGIKPLTWLRLEVEERDGRALLRGVEQLEEEPPELRVAAVAIAVYNPKGAPRSSKDEIIMISVATSDGVEKVLTWREVQGLEQVEVLQDEKEMLLRFAELIKEGDYDVIVGYNTDSFDFPYIRDRLKKLGISLPLGRLDAELEVSRRGALPEARIRGRAHVDLYPIVRRHVKLNSYDLESVVEELLGIKKEKLDGERLFTYWDEGGEKRALLARYALEDARVTLALAEKFLPLYCELSTIVGQSLNDVARMTSGQLVEWLLMRYATPRGELIPNHPAGEEYAARARATYAGGYVREPKRGLVEHIAVFDFRSFGPSIIVSHNIDPSTLIVGNCEENRAPELEYCFSLEREGFIPAILKELIRRRAEIKRELKRSEGDRRRTLSFAEKALKILANSFYGYMGYPRARWYRRECAESVAAFARMYIKQVMRIAEEEFKLEVVYGDTDSLFVVIPPEKRELAQKFLQKVNESMPGIIELEFEGFYRRGLFVTKKRYALLSEDGKMVVKGLEFVRRDWAPIARETQKEVLRILLEEADPEKAARLVRDVIERIRQRRVSLEDITIYTQLTKRIKSYKSLEPHVVAAQKLKERGREVAPGMIIGYIITKGTKGISQRATPVEFARLEDYDPEYYIDNQILPAIQRIFEAIGYTRDYLKEGITQTSLSRWF

SEQ ID NO: 2783 - protein, 792 aa, unidentified
  REGION 1..792: note = Description of Unknown: Synthetic polypeptide
MPRILKGFLIDADFETVEGRALIRLFLRGEEGSFVVYDDSFSPYFYALPGDEPERVKERILASGAAEAIQKVEIEEKRLFGTPRVALRITVSHPQDVPRIRERIRRVEGVDLILEHDILFVRRRLIDRGIKPLTWLRLEVEERDGRALLRGVEQLEEEPPELRVAAVAIAVYNPKGAPRSSKDEIIMISVATSDGVEKVLTWREVQGLEQVEVLQDEKEMLLRFAELIKEGDYDVIVGYNTDSFDFPYIRDRLKKLGISLPLGRDDAELEVSRRGALPEARIRGRAHVDLYPIVRRHVKLNSYDLESVVEELLGIKKEKLDGERLFTYWDEGGEKRALLARYALEDARVTLALAEKFLPLYCELSTIVGQSLNDVARMTSGQLVEWLLMRYATPRGELIPNHPAGEEYAARARATYAGGYVREPKRGLVEHIAVFDFRSFGPSIIVSHNIDPSTLIVGNCEENRAPELEYCFSLEREGFIPAILKELIRRRAEIKRELKRSEGDRRRTLSFAEKALKILANSFYGYMGYPRARWYRRECAESVAAFARMYIKQVMRIAEEEFKLEVVYGDTDSLFVVIPPEKRELAQKFLQKVNESMPGIIELEFEGFYRRGLFVTKKRYALLSEDGKMVVKGLEFVRRDWAPIARETQKEVLRILLEEADPEKAARLVRDVIERIRQRRVSLEDITIYTQLTKRIKSYKSLEPHVVAAQKLKERGREVAPGMIIGYIITKGTKGISQRATPVEFARLEDYDPEYYIDNQILPAIQRIFEAIGYTRDYLKEGITQTSLSRWF

SEQ ID NO: 2784 - protein, 792 aa, unidentified
  REGION 1..792: note = Description of Unknown: Synthetic polypeptide
MPRILKGFLIDADFETVEGRALIRLFLRGEEGSFVVYDDSFSPYFYALPGDEPERVKERILASGAAEAIQKVEIEEKRLFGTPRVALRITVSHPQDVPRIRERIRRVEGVDLILEHDILFVRRRLIDRGIKPLTWLRLEVEERDGRALLRGVEQLEEEPPELRVAAVAIAVYNPKGAPRSSKDEIIMISVATSDGVEKVLTWREVQGLEQVEVLQDEKEMLLRFAELIKEGDYDVIVGYNTDSFDFPYIRDRLKKLGISLPLGRLDAELEVQRRGALPEARIRGRAHVDLYPIVRRHVKLNSYDLESVVEELLGIKKEKLDGERLFTYWDEGGEKRALLARYALEDARVTLALAEKFLPLYCELSTIVGQSLNDVARMTSGQLVEWLLMRYATPRGELIPNHPAGEEYAARARATYAGGYVREPKRGLVEHIAVFDFRSFGPSIIVSHNIDPSTLIVGNCEENRAPELEYCFSLEREGFIPAILKELIRRRAEIKRELKRSEGDRRRTLSFAEKALKILANSFYGYMGYPRARWYRRECAESVAAFARMYIKQVMRIAEEEFKLEVVYGDTDSLFVVIPPEKRELAQKFLQKVNESMPGIIELEFEGFYRRGLFVTKKRYALLSEDGKMVVKGLEFVRRDWAPIARETQKEVLRILLEEADPEKAARLVRDVIERIRQRRVSLEDITIYTQLTKRIKSYKSLEPHVVAAQKLKERGREVAPGMIIGYIITKGTKGISQRATPVEFARLEDYDPEYYIDNQILPAIQRIFEAIGYTRDYLKEGITQTSLSRWF

SEQ ID NO: 2785 - protein, 792 aa, unidentified
  REGION 1..792: note = Description of Unknown: Synthetic polypeptide
MPRILKGFLIDADFETVEGRALIRLFLRGEEGSFVVYDDSFSPYFYALPGDEPERVKERILASGAAEAIQKVEIEEKRLFGTPRVALRITVSHPQDVPRIRERIRRVEGVDLILEHDILFVRRRLIDRGIKPLTWLRLEVEERDGRALLRGVEQLEEEPPELRVAAVAIAVYNPKGAPRSSKDEIIMISVATSDGVEKVLTWREVQGLPQVEVLQDEKEMLLRFAELIKEGDYDVIVGYNTDSFDFPYIRDRLKKLGISLPLGRLDAELEVSRRGALPEARIRGRAHVDLYPIVRRHVKLNSYDLESVVEELLGIKKEKLDGERLFTYWDEGGEKRALLARYALEDARVTLALAEKFLPLYCELSTIVGQSLNDVARMTSGQLVEWLLMRYATPRGELIPNHPAGEEYAARARATYAGGYVREPKRGLVEHIAVFDFRSFGPSIIVSHNIDPSTLIVGNCEENRAPELEYCFSLEREGFIPAILKELIRRRAEIKRELKRSEGDRRRTLSFAEKALKILANSFYGYMGYPRARWYRRECAESVAAFARMYIKQVMRIAEEEFKLEVVYGDTDSLFVVIPPEKRELAQKFLQKVNESMPGIIELEFEGFYRRGLFVTKKRYALLSEDGKMVVKGLEFVRRDWAPIARETQKEVLRILLEEADPEKAARLVRDVIERIRQRRVSLEDITIYTQLTKRIKSYKSLEPHVVAAQKLKERGREVAPGMIIGYIITKGTKGISQRATPVEFARLEDYDPEYYIDNQILPAIQRIFEAIGYTRDYLKEGITQTSLSRWF

SEQ ID NO: 2786 - protein, 792 aa, unidentified
  REGION 1..792: note = Description of Unknown: Synthetic polypeptide
MPRILKGFLIDADFETVEGRALIRLFLRGEEGSFVVYDDSFSPYFYALPGDEPERVKERILASGAAEAIQKVEIEEKRLFGTPRVALRITVSHPQDVPRIRERIRRVEGVDLILEHDILFVRRRLIDRGIKPLTWLRLEVEERDGRALLRGVEQLEEEPPELRVAAVDIEVYNPKGAPRSSKDEIIMISVATSDGVEKVLTWREVQGLEQVEVLQDEKEMLLRFAELIKEGDYDVIVGYNTDSFDFPYIRDRLKKLGISLPLGRLDAELEVSRRGALPEARIRGRAHVDLYPIVRRHVKLNSYDLESVVEELLGIKKEKLDGERLFTYWDEGGEKRALLARYALEDARVTLALAEKFLPLYCELSTIVGQSLNDVARMTSGQLVEWLLMRYATPRGELIPNHPAGEEYAARARATYAGGYVREPKRGLVEHIAVFDFRSFGPSIIVSHNIDPSTLIVGNCEENRAPELEYCFSLEREGFIPAILKELIRRRAEIKRELKRSEGDRRRTLSFAEKALKILANSFYGYMGYPRARWYRRECAESVAAFARMYIKQVMRIAEEEFKLEVVYGDTDSLFVVIPPEKRELAQKFLQKVNESMPGIIELEFEGFYRRGLFVTKKRYALLSEDGKMVVKGLEFVRRDWAPIARETQKEVLRILLEEADPEKAARLVRDVIERIRQRRVSLEDITIYTQLTKRIKSYKSLEPHVVAAQKLKERGREVAPGMIIGYIITKGTKGISQRATPVEFARLEDYDPEYYIDNQILPAIQRIFEAIGYTRDYLKEGITQTSLSRWF

SEQ ID NO: 2787 - protein, 792 aa, unidentified
  REGION 1..792: note = Description of Unknown: Synthetic polypeptide
MPRILKGFLIDADFETVEGRALIRLFLRGEEGSFVVYDDSFSPYFYALPGDEPERVKERILASGAAEAIQKVEIEEKRLFGTPRVALRITVSHPQDVPRIRERIRRVEGVDLILEHDILFVRRRLIDRGIKPLTWLRLEVEERDGRALLRGVEQLEEEPPELRVAAVAIAVYNPKGAPRSSKDEIIMISVATSDGVEKVLTWREVQGLEQVEVLQDEKEMLLRFAELIKEGDYDVIVGYNTDSFDFPYIRDRLKKLGISLPLGRLDAELEVSRRGALPEARIRGRAHVDLYPIVRRHVKLNSYDLESVVEELLGIKKEKLDGEELFTYWDEGGEKRALLARYALEDARVTLALAEKFLPLYCELSTIVGQSLNDVARMTSGQLVEWLLMRYATPRGELIPNHPAGEEYAARARATYAGGYVREPKRGLVEHIAVFDFRSFGPSIIVSHNIDPSTLIVGNCEENRAPELEYCFSLEREGFIPAILKELIRRRAEIKRELKRSEGDRRRTLSFAEKALKILANSFYGYMGYPRARWYRRECAESVAAFARMYIKQVMRIAEEEFKLEVVYGDTDSLFVVIPPEKRELAQKFLQKVNESMPGIIELEFEGFYRRGLFVTKKRYALLSEDGKMVVKGLEFVRRDWAPIARETQKEVLRILLEEADPEKAARLVRDVIERIRQRRVSLEDITIYTQLTKRIKSYKSLEPHVVAAQKLKERGREVAPGMIIGYIITKGTKGISQRATPVEFARLEDYDPEYYIDNQILPAIQRIFEAIGYTRDYLKEGITQTSLSRWF

SEQ ID NO: 2788 - protein, 23 aa, unidentified
  REGION 1..23: note = Description of Unknown: Synthetic polypeptide
TWLRLEVEERDGRALLRGVEQLE

SEQ ID NO: 2789 - protein, 773 aa, unidentified
  REGION 1..773: note = Description of Unknown: Synthetic polypeptide
  source 1..773: note = Euryarchaeota archaeon
MARDLLLDIDYVTVDEKAQVRLFLKDKILFDPGFQPYFYVLAHDGAVEERLRDFGAVEAVQRRMLGREMRFFKLILSHPSEVPKIREEVRSIEGVEGIFEHDILFARRYLIDKGLTPLNYAEYRAEQGFLKGISSAGEGPESLRVMAFDIETYNPKGAPRAEKDPVIMLSLSTNTGLRRLLTYKSGEGLDFVELVEDEKALLHRFKELVNEEGVEVLVGYNSDQFDLPYLVARAKALGVELPLGQDGSQPQIRKGRGLVESVVKGRPHVDLYPIVRRNVRLSSYVLENVVKEVLGREKEKIPHDAMCGYWDRGGRELQRFMAYSMEDADVTLELAERFLPLYIELSRVVGLPLHDVARMTAGQLVEWLLIREAFARGEVVPNKGSGREYLARSEDTYAGGYVMEPVKGIVENIVVFDFRSLYPSIIVTHNIDPATLRPGRGENSPPELDYHFTTEEEGFIPSVLKRVLERRLSAKRRMKEARDPGEKRMLDISQRALKIIANSFYGYMGYPRARWYKKECAESVTSFARMYTKKVMAIAEEEYGFKVVYGDTDSLFIVVQPEEKERAMSFMEDVNRRLPGTVELEYDGFYPRGIFITKKRYALIDEKGNIVVKGLETVRRDWTRLSRDTQQKVLSVILREGDPKKAADIVKDTINRLKERRVDLEDITIYTQLTKGIGRYKNVGPHVKAAQKAIDRGREVNPGMAIGYIIKKGRGLISDRAEPVEDATIEDYDVDYYIENQVLPPVARIMEVLGYSKEHLKEEMVQGSLQRWF

SEQ ID NO: 2790 - protein, 809 aa, unidentified
  REGION 1..809: note = Description of Unknown: Synthetic polypeptide
  source 1..809: note = Hadesarchaea archaeon
MRGLLFDVDIAEEEERPNVRLFVKVASETVVAIDPQFEEYFYVVADHPAKTSKLIEKIELDEGGRPIRPKSVEMVRRTLLGNEVEAIRVSFHQPRDAAKLRHKIRELPGVKEIYEFDIPPARRYLIDRGLTPMAGIEFSGSIEVRDGVKTVVMDGPPKPAPVEETRLNIMSFDIEVYNPTGSVRPDKDPIIMISLADNRGLRKVITWKNFDKKPEYVEVVGSEREMIKKFVELVKERDVDILLGYNTDLFDLPYIRSRAKQLRVKLDLGRDGSELVVRKRRFATASKIRGRVHVDVFAMVDFLATIGSIRLIHYSLADVYRHYAGREKPDFEFSEMINAWERGGDAGRRFLEYSMSDADATLEVGSELLPLFLGLTRVVGQTLFDVQRMTPGQLVEWLLVAEAHRIGELVPPRPVGEEFEERAEGTFTGAYVMEPVKGLHEDLVVFDFRSLYPSIIVTHNIDPSTLNCRDCKPGEREQVPGLSYYFCKRRKGFIPAVLERVIEERTKLKAELKKIGRETREYRALDARQWAMKIVANSFYGMLGYPRARWYSKQCAESVTSFGRHYIHRTIEMAREFGLEVVYGDTDSLHCKLNGKTREEAMVFLRKVNESLPGIMELELEGFYPRGIFITKKRYAMVDDEGRMVVKGLEFVRRDWAAIAKKTQEEVLRAILRDGSPKKAAEIIRKTTRDVYEGRVNLEDLIIYTQLKMPIESYKAIGPHVVAAKRLRELGHEIEPGMMIAYIEVKGPGSISDRAVPVEDFEGKEYDPDYYVGHQILPAVMRIMEVLGYSEEDLKFEREKQIGLDRFMK

SEQ ID NO: 2791 - protein, 774 aa, unidentified
  REGION 1..774: note = Description of Unknown: Synthetic polypeptide
  source 1..774: note = Thermococcus sp. 2319x1
MILDTDYITKDGKPIIRIFKKENGEFKIELDPHFQPYIYALLKDDSAIEEIKAIKGERHGKTVRVLDAVKVRKKFLGREVEVWKLIFEHPQDVPAMRDKIKEHPAVIDIYEYDIPFAKRYLIDKGLIPMEGDEELKLLAFDIETFYHEGDEFGKGEIIMISYADEEEARVITWKNIDLPYVDVVSNEREMIKRFVQVVKEKDPDVIITYNGDNFDLPYLIKRAEKLGIRLVLGRDKENPEPKIQRMGDSFAVEIKGRIHFDLFPVVRRTINLPTYTLEAVYEAVLGKTKSKLGAEEIAAIWETEESMKKLAQYSMEDARATYELGKEFFPMEAELAKLIGQSVWDVSRSSTGNLVEWYLLRVAYARNELAPNKPDEEEYKRRLRTTYLGGYVKEPEKGLWENIIYLDFRSLYPSIIVTHNVSPDTLEKEGCENYDIAPIVGYKFCKDFPGFIPSILGDLIAMRQEIKKKMKATIDPIEKKMLDYRQRAVKLLANSYYGYMGYPKARWYSKECAESVTAWGRHYIEMTIKEIEEKFGFKVLYADTDGFYATIPGEKPEIIKKKAREFLNYINSKLPGLLELEYEGFYLRGFFVTKKRYAVIDEEGRITTRGLEVVRRDWSEIAKETQAKVLEAILKDGSVEKAVEIVRDVVEKIAKYRVPLEKLVIHEQITRDLKDYKAIGPHVSIAKRLATRGIKVKPGTIISYLVLKGGGRISDRVILLTEYDPEKHKYDPDYYIENQVLPAVLRILEAFGYRKEDLRYQSSKQTGLDAWLKR

SEQ ID NO: 2792 - protein, 806 aa, unidentified
  REGION 1..806: note = Description of Unknown: Synthetic polypeptide
  source 1..806: note = Candidatus Hadarchaeum yellowstonense
MLLDVDYAEEEEKPSIRLFVKTGSEVLVAIDPDFEEYFYVVSDHPAKASKLIEKVEVEEDGVSIRPKGVEIVKRTFLGNEVEAIKVSFYQAKDSSKLRHKIRELPGVREIYEFDIPPARRYLIDRGLTPMAGVEFDGRIEERQGIKTVILDSPPRPAQVEEPKLNIMSFDIEVYNPTGSVRPDKDPIIMISLADNNGLRKVITWKNFERSQEYVEVVGSEREMIKRFVDLVKERDVDILLGYNTDLFDLPYIRSRAKQLKVKLDLGRDGSELVVRKRRFATASKIRGRIHVDVFAMVDFLATIGSIKLIHYSLADVYRHLLGKEKPDFEFTEMVDAWEKGGDAGRKFLEYSMSDADATLEVGLELLPLFLGLTRVVGQTLFDVQRMTPGQLVEWLLVAEAHRIGELVPGRPVGEEYEERMEETFVGAYVMEPVKGLHENLVVFDFRSLYPSIIVTHNIDPSTLNCKDCKPGEREQVPGLEYYFCRRRKGFIPATLQRIIEERMKLKAELKKLVRGTKEYRALDARQWAMKIVANSFYGMLGYPRARWYSKECAESVTSFGRHYIHKTIDMAREFGLEVVYGDTDSLHCKLNGKTREEALAFLKKVNDSLPGIMELELEGFYPRGIFITKKRYAMIDDEGRMVVKGLEFVRRDWAAIAKKTQEEVLKAILRDGSPEKAAEIIRKTTRDVYEGRVNLEDLIIYTQLKMPIESYKAIGPHVVAAKRLRELGHEIEPGMMIAYVEVKGPGSISERAVPVEDFKGREYDPDYYVGHQVLPAVMRIMEVLGYREIDLKFERQRQVGLDRFMK

SEQ ID NO: 2793 - protein, 687 aa, unidentified
  REGION 1..687: note = Description of Unknown: Synthetic polypeptide
  source 1..687: note = Euryarchaeota archaeon
MDGFLLDVDYKTVDEKPVVRLFLRDVIALDPSFRPYVYVACDDPRAVAGEIKDLELDGRRPVTGVEEMERGLLGRPRRFLKVYLGHPQQVPRVRDLLRRLPGVSAVLEDDILFSRRYLIDKGLVPTAWVELQGRVEGSEFWVEEVRRAEGPLPRLKVMSFDIETYNPKGAPRGDQDPIIMVSMATSGGLRKVLSWKAPTAGLEFVETLEDEAAVLRRFEELVRQEDPDILVGYNTDNFDFPYLNQRLKALGIELALGRDGSPHKTSTRMGMSETRMAGRPHMDLYPIVRRSLRLPSYVLEDVVAEVLGEEKEKVPGERMGEIWDKGGEELDRFFRYSLEDAEVTLRIGEKYLPLYIELSRLVGQSIHDVARMTAGQLVEWYLMREAFARGEVIPERPGGREFARRAGDTYEGGYVREPRKGLLEKVFDFRSLYPSVIVTHNIDPSTIRPGPGENQPPGIDYHFTTEKEGFIPALLKRLVARRAELKEEMKKARDPGERKMLDVQQQALKILANSFYGYMGYPRARWYRKECAESVTAFARDYIKKVMEVAEKEFGLEVVYGDTDSLFILVPGGKKERAFAFLEEVNRRLPGTIELEYEGFYRRGIFVTKKRYALIDEKDRIIVKGLEFVRRDWAPIARDTQEKVLKALLKDASPEEAVRIVRKAMDDIRARRVSLEDLTIYTQLTKK

SEQ ID NO: 2794 - protein, 876 aa, Geobacillus stearothermophilus
  REGION 1..876: note = Description of Unknown: Synthetic polypeptide
MKKKLVLIDGNSVAYRAFFALPLLHNDKGIHTNAVYGFTMMLNKILAEEQPTHLLVAFDAGKTTFRHETFQEYKGGRQQTPPELSEQFPLLRELLKAYRIPAYELDHYEADDIIGTLAARAEQEGFEVKIISGDRDLTQLASRHVTVDITKKGITDIEPYTPETVREKYGLTPEQIVDLKGLMGDKSDNIPGVPGIGEKTAVKLLKQFGTVENVLASIDEVKGEKLKENLRQHRDLALLSKQLASICRDAPVELSLDDIVYEGQDREKVIALFKELGFQSFLEKMAAPAAEGEKPLEEMEFAIVDVITEEMLADKAALVVEVMEENYHDAPIVGIALVNEHGRFFMRPETALADSQFLAWLADETKKKSMFDAKRAVVALKWKGIELRGVAFDLLLAAYLLNPAQDAGDIAAVAKMKQYEAVRSDEAVYGKGVKRSLPDEQTLAEHLVRKAAAIWALEQPFMDDLRNNEQDQLLTKLEQPLAAILAEMEFTGVNVDTKRLEQMGSELAEQLRAIEQRIYELAGQEFNINSPKQLGVILFEKLQLPVLKKTKTGYSTSADVLEKLAPHHEIVENILHYRQLGKLQSTYIEGLLKVVRPDTGKVHTMFNQALTQTGRLSSAEPNLQNIPIRLEEGRKIRQAFVPSEPDWLIFAADYSQIELRVLAHIADDDNLIEAFQRDLDIHTKTAMDIFHVSEEEVTANMRRQAKAVNFGIVYGISDYGLAQNLNITRKEAAEFIERYFASFPGVKQYMENIVQEAKQKGYVTTLLHRRRYLPDITSRNFNVRSFAERTAMNTPIQGSAADIIKKAMIDLAARLKEEQLQARLLLQVHDELILEAPKEEIERLCELVPEVMEQAVTLRVPLKVDYHYGPTWYDAK

SEQ ID NO: 2795 - protein, 775 aa, unidentified
  REGION 1..775: note = Description of Unknown: Synthetic polypeptide
  source 1..775: note = 9N
MILDTDYITENGKPVIRVFKKENGEFKIEYDRTFEPYFYALLKDDSAIEDVKKVTAKRHGTVVKVKRAEKVQKKFLGRPIEVWKLYFNHPQDVPAIRDRIRAHPAVVDIYEYDIPFAKRYLIDKGLIPAEGDEELTMLAFDIETLYHEGEEFGTGPILMISYADGSEARVITWKKIDLPYVDVVSTEKEMIKRFLRVVREKDPDVLITYNGDNFDFAYLKKRCEELGIKFTLGRDGSEPKIQRMGDRFAVEVKGRIHFDLYPVIRRTINLPTYTLEAVYEAVFGKPKEKVYAEEIAQAWESGEGLERVARYSMEDAKVTYELGREFFPMEAQLSRLIGQSLWDVSRSSTGNLVEWFLLRKAYKRNELAPNKPDERELARRRGGYAGGYVKEPERGLWDNIVYLDFRSLYPSIIITHNVSPDTLNREGCKEYDVAPEVGHKFCKDFPGFIPSLLGDLLEERQKIKRKMKATVDPLEKKLLDYRQRAIKILANSFYGYYGYAKARWYCKECAESVTAWGREYIEMVIRELEEKFGFKVLYADTDGLHATIPGADAETVKKKAKEFLKYINPKLPGLLELEYEGFYVRGFFVTKKKYAVIDEEGKITTRGLEIVRRDWSEIAKETQARVLEAILKHGDVEEAVRIVKEVTEKLSKYEVPPEKLVIHEQITRDLRDYKATGPHVAVAKRLAARGVKIRPGTVISYIVLKGSGRIGDRAIPADEFDPTKHRYDAEYYIENQVLPAVERILKAFGYRKEDLRYQKTKQVGLGAWLKVKGKK

SEQ ID NO: 2796 - protein, 775 aa, unidentified
  REGION 1..775: note = Description of Unknown: Synthetic polypeptide
  source 1..775: note = 9N
MILDTDYITENGKPVIRVFKKENGEFKIEYDRTFEPYFYALLKDDSAIEDVKKVTAKRHGTVVKVKRAEKVQKKFLGRPIEVWKLYFNHPQDVPAIRDRIRAHPAVVDIYEYDIPFAKRYLIDKGLIPMEGDEELTMLAFDIETLYHEGEEFGTGPILMISYADGSEARVITWKKIDLPYVDVVSTEKEMIKRFLRVVREKDPDVLITYNGDNFDFAYLKKRCEELGIKFTLGRDGSEPKIQRMGDRFAVEVKGRIHFDLYPVIRRTINLPTYTLEAVYEAVFGKPKEKVYAEEIAQAWESGEGLERVARYSMEDAKVTYELGREFFPMEAQLSRLIGQSLWDVSRSSTGNLVEWFLLRKAYKRNELAPNKPDERELARRRGGYAGGYVKEPERGLWDNIVYLDFRSLYPSIIITHNVSPDTLNREGCKEYDVAPEVGHKFCKDFPGFIPSLLGDLLEERQKIKRKMKATVDPLEKKLLDYRQRAIKILANSFYGYYGYAKARWYCKECAESVTAWGREYIEMVIRELEEKFGFKVLYADTDGLHATIPGADAETVKKKAKEFLKYINPKLPGLLELEYEGFYVRGFFVTKKKYAVIDEEGKITTRGLEIVRRDWSEIAKETQARVLEAILKHGDVEEAVRIVKEVTEKLSKYEVPPEKLVIHEQITRDLRDYKATGPHVAVAKRLAARGVKIRPGTVISYIVLKGSGRIGDRAIPADEFDPTKHRYDAEYYIENQVLPAVERILKAFGYRKEDLRYQKTKQVGLGAWLKVKGKK

SEQ ID NO: 2797 - protein, 775 aa, unidentified
  REGION 1..775: note = Description of Unknown: Synthetic polypeptide
  source 1..775: note = Therminator
MILDTDYITENGKPVIRVFKKENGEFKIEYDRTFEPYFYALLKDDSAIEDVKKVTAKRHGTVVKVKRAEKVQKKFLGRPIEVWKLYFNHPQDVPAIRDRIRAHPAVVDIYEYDIPFAKRYLIDKGLIPMEGDEELTMLAFAIATLYHEGEEFGTGPILMISYADGSEARVITWKKIDLPYVDVVSTEKEMIKRFLRVVREKDPDVLITYNGDNFDFAYLKKRCEELGIKFTLGRDGSEPKIQRMGDRFAVEVKGRIHFDLYPVIRRTINLPTYTLEAVYEAVFGKPKEKVYAEEIAQAWESGEGLERVARYSMEDAKVTYELGREFFPMEAQLSRLIGQSLWDVSRSSTGNLVEWFLLRKAYKRNELAPNKPDERELARRRGGYAGGYVKEPERGLWDNIVYLDFRSLYPSIIITHNVSPDTLNREGCKEYDVAPEVGHKFCKDFPGFIPSLLGDLLEERQKIKRKMKATVDPLEKKLLDYRQRLIKILANSFYGYYGYAKARWYCKECAESVTAWGREYIEMVIRELEEKFGFKVLYADTDGLHATIPGADAETVKKKAKEFLKYINPKLPGLLELEYEGFYVRGFFVTKKKYAVIDEEGKITTRGLEIVRRDWSEIAKETQARVLEAILKHGDVEEAVRIVKEVTEKLSKYEVPPEKLVIHEQITRDLRDYKATGPHVAVAKRLAARGVKIRPGTVISYIVLKGSGRIGDRAIPADEFDPTKHRYDAEYYIENQVLPAVERILKAFGYRKEDLRYQKTKQVGLGAWLKVKGKK

SEQ ID NO: 2798 - protein, 1702 aa, unidentified
  REGION 1..1702: note = Description of Unknown: Synthetic polypeptide
  source 1..1702: note = Vent polymerase
MILDTDYITKDGKPIIRIFKKENGEFKIELDPHFQPYIYALLKDDSAIEEIKAIKGERHGKTVRVLDAVKVRKKFLGREVEVWKLIFEHPQDVPAMRGKIREHPAVVDIYEYDIPFAKRYLIDKGLIPMEGDEELKLLAFDIETFYHEGDEFGKGEIIMISYADEEEARVITWKNIDLPYVDVVSNEREMIKRFVQVVKEKDPDVIITYNGDNFDLPYLIKRAEKLGVRLVLGRDKEHPEPKIQRMGDSFAVEIKGRIHFDLFPVVRRTINLPTYTLEAVYEAVLGKTKSKLGAEEIAAIWETEESMKKLAQYSMEDARATYELGKEFFPMEAELAKLIGQSVWDVSRSSTGNLVEWYLLRVAYARNELAPNKPDEEEYKRRLRTTYLGGYVKEPEKGLWENIIYLDFRSLYPSIIVTHNVSPDTLEKEGCKNYDVAPIVGYRFCKDFPGFIPSILGDLIAMRQDIKKKMKSTIDPIEKKMLDYRQRAIKLLANSILPNEWLPIIENGEIKFVKIGEFINSYMEKQKENVKTVENTEVLEVNNLFAFSFNKKIKESEVKKVKALIRHKYKGKAYEIQLSSGRKINITAGHSLFTVRNGEIKEVSGDGIKEGDLIVAPKKIKLNEKGVSINIPELISDLSEEETADIVMTISAKGRKNFFKGMLRTLRWMFGEENRRIRTFNRYLFHLEKLGLIKLLPRGYEVTDWERLKKYKQLYEKLAGSVKYNGNKREYLVMFNEIKDFISYFPQKELEEWKIGTLNGFRTNCILKVDEDFGKLLGYYVSEGYAGAQKNKTGGISYSVKLYNEDPNVLESMKNVAEKFFGKVRVDRNCVSISKKMAYLVMKCLCGALAENKRIPSVILTSPEPVRWSFLEAYFTGDGDIHPSKRFRLSTKSELLANQLVFLLNSLGISSVKIGFDSGVYRVYINEDLQFPQTSREKNTYYSNLIPKEILRDVFGKEFQKNMTFKKFKELVDSGKLNREKAKLLEFFINGDIVLDRVKSVKEKDYEGYVYDLSVEDNENFLVGFGLLYAHNSYYGYMGYPKARWYSKECAESVTAWGRHYIEMTIREIEEKFGFKVLYADSVSGESEIIIRQNGKIRFVKIKDLFSKVDYSIGEKEYCILEGVEALTLDDDGKLVWKPVPYVMRHRANKRMFRIWLTNSWYIDVTEDHSLIGYLNTSKTKTAKKIGERLKEVKPFELGKAVKSLICPNAPLKDENTKTSEIAVKFWELVGLIVGDGNWGGDSRWAEYYLGLSTGKDAEEIKQKLLEPLKTYGVISNYYPKNEKGDFNILAKSLVKFMKRHFKDEKGRRKIPEFMYELPVTYIEAFLRGLFSADGTVTIRKGVPEIRLTNIDADFLREVRKLLWIVGISNSIFAETTPNRYNGVSTGTYSKHLRIKNKWRFAERIGFLIERKQKRLLEHLKSARVKRNTIDFGFDLVHVKKVEEIPYEGYVYDIEVEETHRFFANNILVHNTDGFYATIPGEKPELIKKKAKEFLNYINSKLPGLLELEYEGFYLRGFFVTKKRYAVIDEEGRITTRGLEVVRRDWSEIAKETQAKVLEAILKEGSVEKAVEVVRDVVEKIAKYRVPLEKLVIHEQITRDLKDYKAIGPHVAIAKRLAARGIKVKPGTIISYIVLKGSGKISDRVILLTEYDPRKHKYDPDYYIENQVLPAVLRILEAFGYRKEDLRYQSSKQTGLDAWLKR

SEQ ID NO: 2799 - protein, 1312 aa, unidentified
  REGION 1..1312: note = Description of Unknown: Synthetic polypeptide
  source 1..1312: note = Deep Vent polymerase
MILDADYITEDGKPIIRIFKKENGEFKVEYDRNFRPYIYALLKDDSQIDEVRKITAERHGKIVRIIDAEKVRKKFLGRPIEVWRLYFEHPQDVPAIRDKIREHSAVIDIFEYDIPFAKRYLIDKGLIPMEGDEELKLLAFDIETLYHEGEEFAKGPIIMISYADEEEAKVITWKKIDLPYVEVVSSEREMIKRFLKVIREKDPDVIITYNGDSFDLPYLVKRAEKLGIKLPLGRDGSEPKMQRLGDMTAVEIKGRIHFDLYHVIRRTINLPTYTLEAVYEAIFGKPKEKVYAHEIAEAWETGKGLERVAKYSMEDAKVTYELGREFFPMEAQLSRLVGQPLWDVSRSSTGNLVEWYLLRKAYERNELAPNKPDEREYERRLRESYAGGYVKEPEKGLWEGLVSLDFRSLYPSIIITHNVSPDTLNREGCREYDVAPEVGHKFCKDFPGFIPSLLKRLLDERQEIKRKMKASKDPIEKKMLDYRQRAIKILANSILPEEWVPLIKNGKVKIFRIGDFVDGLMKANQGKVKKTGDTEVLEVAGIHAFSFDRKSKKARVMAVKAVIRHRYSGNVYRIVLNSGRKITITEGHSLFVYRNGDLVEATGEDVKIGDLLAVPRSVNLPEKRERLNIVELLLNLSPEETEDIILTIPVKGRKNFFKGMLRTLRWIFGEEKRVRTASRYLRHLENLGYIRLRKIGYDIIDKEGLEKYRTLYEKLVDVVRYNGNKREYLVEFNAVRDVISLMPEEELKEWRIGTRNGFRMGTFVDIDEDFAKLLGYYVSEGSARKWKNQTGGWSYTVRLYNENDEVLDDMEHLAKKFFGKVKRGKNYVEIPKKMAYIIFESLCGTLAENKRVPEVIFTSSKGVRWAFLEGYFIGDGDVHPSKRVRLSTKSELLVNGLVLLLNSLGVSAIKLGYDSGVYRVYVNEELKFTEYRKKKNVYHSHIVPKDILKETFGKVFQKNISYKKFRELVENGKLDREKAKRIEWLLNGDIVLDRVVEIKREYYDGYVYDLSVDEDENFLAGFGFLYAHNSYYGYYGYAKARWYCKECAESVTAWGREYIEFVRKELEEKFGFKVLYIDTDGLYATIPGAKPEEIKKKALEFVDYINAKLPGLLELEYEGFYVRGFFVTKKKYALIDEEGKIITRGLEIVRRDWSEIAKETQAKVLEAILKHGNVEEAVKIVKEVTEKLSKYEIPPEKLVIYEQITRPLHEYKAIGPHVAVAKRLAARGVKVRPGMVIGYIVLRGDGPISKRAILAEEFDLRKHKYDAEYYIENQVLPAVLRILEAFGYRKEDLRWQKTKQTGLTAWLNIKKK

SEQ ID NO: 2800 - protein, 775 aa, Pyrococcus furiosus
  REGION 1..775: note = Description of Unknown: Synthetic polypeptide
MILDVDYITEEGKPVIRLFKKENGKFKIEHDRTFRPYIYALLRDDSKIEEVKKITGERHGKIVRIVDVEKVEKKFLGKPITVWKLYLEHPQDVPTIREKVREHPAVVDIFEYDIPFAKRYLIDKGLIPMEGEEELKILAFDIETLYHEGEEFGKGPIIMISYADENEAKVITWKNIDLPYVEVVSSEREMIKRFLRIIREKDPDIIVTYNGDSFDFPYLAKRAEKLGIKLTIGRDGSEPKMQRIGDMTAVEVKGRIHFDLYHVITRTINLPTYTLEAVYEAIFGKPKEKVYADEIAKAWESGENLERVAKYSMEDAKATYELGKEFLPMEIQLSRLVGQPLWDVSRSSTGNLVEWFLLRKAYERNEVAPNKPSEEEYQRRLRESYTGGFVKEPEKGLWENIVYLDFRALYPSIIITHNVSPDTLNLEGCKNYDIAPQVGHKFCKDIPGFIPSLLGHLLEERQKIKTKMKETQDPIEKILLDYRQKAIKLLANSFYGYYGYAKARWYCKECAESVTAWGRKYIELVWKELEEKFGFKVLYIDTDGLYATIPGGESEEIKKKALEFVKYINSKLPGLLELEYEGFYKRGFFVTKKRYAVIDEEGKVITRGLEIVRRDWSEIAKETQARVLETILKHGDVEEAVRIVKEVIQKLANYEIPPEKLAIYEQITRPLHEYKAIGPHVAVAKKLAAKGVKIKPGMVIGYIVLRGDGPISNRAILAEEYDPKKHKYDAEYYIENQVLPAVLRILEGFGYRKEDLRYQKTRQVGLTSWLNIKKS

SEQ ID NO: 2801 - protein, 771 aa, Pyrococcus sp.
  REGION 1..771: note = Description of Unknown: Synthetic polypeptide
  source 1..771: note = Pyrococcus abyssi
MIIDADYITEDGKPIIRIFKKEKGEFKVEYDRTFRPYIYALLKDDSAIDEVKKITAERHGKIVRITEVEKVQKKFLGRPIEVWKLYLEHPQDVPAIREKIREHPAVVDIFEYDIPFAKRYLIDKGLTPMEGNEELTFLAVDIETLYHEGEEFGKGPIIMISYADEEGAKVITWKSIDLPYVEVVSSEREMIKRLVKVIREKDPDVIITYNGDNFDFPYLLKRAEKLGIKLPLGRDNSEPKMQRMGDSLAVEIKGRIHFDLFPVIRRTINLPTYTLEAVYEAIFGKSKEKVYAHEIAEAWETGKGLERVAKYSMEDAKVTFELGKEFFPMEAQLARLVGQPVWDVSRSSTGNLVEWFLLRKAYERNELAPNKPDEREYERRLRESYEGGYVKEPEKGLWEGIVSLDFRSLYPSIIITHNVSPDTLNRENCKEYDVAPQVGHRFCKDFPGFIPSLLGNLLEERQKIKKRMKESKDPVEKKLLDYRQRAIKILANSYYGYYGYAKARWYCKECAESVTAWGRQYIDLVRRELESRGFKVLYIDTDGLYATIPGAKHEEIKEKALKFVEYINSKLPGLLELEYEGFYARGFFVTKKKYALIDEEGKIVTRGLEIVRRDWSEIAKETQAKVLEAILKHGNVDEAVKIVKEVTEKLSKYEIPPEKLVIYEQITRPLSEYKAIGPHVAVAKRLAAKGVKVKPGMVIGYIVLRGDGPISKRAIAIEEFDPKKHKYDAEYYIENQVLPAVERILRAFGYRKEDLKYQKTKQVGLGAWLKF

SEQ ID NO: 2802 - protein, 903 aa, unidentified
  REGION 1..903: note = Description of Unknown: Synthetic polypeptide
  source 1..903: note = RB69 polymerase
MKEFYLTVEQIGDSIFERYIDSNGRERTREVEYKPSLFAHCPESQATKYFDIYGKPCTRKLFANMRDASQWIKRMEDIGLEALGMDDFKLAYLSDTYNYEIKYDHTKIRVANFDIEVTSPDGFPEPSQAKHPIDAITHYDSIDDRFYVFDLLNSPYGNVEEWSIEIAAKLQEQGGDEVPSEIIDKIIYMPFDNEKELLMEYLNFWQQKTPVILTGWNVESFDIPYVYNRIKNIFGESTAKRLSPHRKTRVKVIENMYGSREIITLFGISVLDYIDLYKKFSFTNQPSYSLDYISEFELNVGKLKYDGPISKLRESNHQRYISYNIIDVYRVLQIDAKRQFINLSLDMGYYAKIQIQSVFSPIKTWDAIIFNSLKEQNKVIPQGRSHPVQPYPGAFVKEPIPNRYKYVMSFDLTSLYPSIIRQVNISPETIAGTFKVAPLHDYINAVAERPSDVYSCSPNGMMYYKDRDGVVPTEITKVFNQRKEHKGYMLAAQRNGEIIKEALHNPNLSVDEPLDVDYRFDFSDEIKEKIKKLSAKSLNEMLFRAQRTEVAGMTAQINRKLLINSLYGALGNVWFRYYDLRNATAITTFGQMALQWIERKVNEYLNEVCGTEGEAFVLYGDTDSIYVSADKIIDKVGESKFRDTNHWVDFLDKFARERMEPAIDRGFREMCEYMNNKQHLMFMDREAIAGPPLGSKGIGGFWTGKKRYALNVWDMEGTRYAEPKLKIMGLETQKSSTPKAVQKALKECIRRMLQEGEESLQEYFKEFEKEFRQLNYISIASVSSANNIAKYDVGGFPGPKCPFHIRGILTYNRAIKGNIDAPQVVEGEKVYVLPLREGNPFGDKCIAWPSGTEITDLIKDDVLHWMDYTVLLEKTFIKPLEGFTSAAKLDYEKKASLFDMFDF

SEQ ID NO: 2803 - protein, 575 aa, unidentified [sequence omitted]

SEQ ID NO: 2804 - protein, 134 aa, unidentified
  REGION 1..134: note = Description of Unknown: Synthetic polypeptide
MILDTDYITENGKPVIRIFKKEKGEFKIEYDRNFEPYIYALLEDDESIEDIKKITGERHGKKVRIIRVEKVKKKFLGEPIEVWKLVFEHPQDVPAIRDAIRSHPAVREIFEYDIPFAKRYLIDKGLVPMEGGEE

SEQ ID NO: 2805 - protein, 222 aa, unidentified
  REGION 1..222: note = Description of Unknown: Synthetic polypeptide
LKLLAFDIETFYHEGDEFAEGEILMISYADESGAKVITWKKIDLPYVEVVSTEREAIKRFLQVLREKDPDVLLTYNGDNFDFAYIKKRCEKLGLKFTIGRDGSEPKIQRMGDRFAVEVKGRIHLDLYPVVRHTIRLPTYTLEAVYEAVFGKKKEKVYAEEIAEAWKSEEGLKRVAQYSMEDARATYELGREFFPMEVELAKLIGQSVWDVSRSSTGNLVEWY

SEQ ID NO: 2806 - protein, 98 aa, unidentified
  REGION 1..98: note = Description of Unknown: Synthetic polypeptide
LLRVAYERNELAPNKPGGEEYQRRMRSSYIGGYVKEPEKGLWESIAYLDFRSLYPSIIVTHNVSPDTLEKECKNYDVAPIVGYRFCKDFKGFIPSILE

SEQ ID NO: 2807 - protein, 50 aa, unidentified
  REGION 1..50: note = Description of Unknown: Synthetic polypeptide
DLIETRQKVKRKMKATIDPIEKKMLDYRQRALKILANSYYGYQGYPKARW

SEQ ID NO: 2808 - protein, 110 aa, unidentified
  REGION 1..110: note = Description of Unknown: Synthetic polypeptide
SKECAESVTAWGRHYIETTIKEAEKFGFKVLYADTDGFFATIPNEKPETIKSKAKKFLKHINEKLPGMLELEYEGFYLRGFFVTKKKYALIDEDGHITTRGLEVVRRDWS

SEQ ID NO: 2809 - protein, 150 aa, unidentified
  REGION 1..150: note = Description of Unknown: Synthetic polypeptide
EIAKETQAKVLEVILREGSIEKAAGIVKKVVEDLANYRVPVEKLIIHEQITRELKDYKATGPHVAIAKRLQARGIKVKPGTIISYVVLKGSKKISDRVILFDEYDSSRHKYDPDYYIHNQVLPAVLRILEAFGYKEKDLEYQRMKQTGLG

SEQ ID NO: 2810 - protein, 162 aa, unidentified
  REGION 1..162: note = Description of Unknown: Synthetic polypeptide
MPRILKGFLIDADYETVEGRALIRLFLRGEEGSFVVYDDSFSPYFYALPGDEPERVKERILASGAAEAIQKVEIEEKRLFGTPRVALRITVSHPQDVPRIRERIRRVEGVDLILEHDILFVRRYLIDRGIKPLTWLRLEVEERDGRALLRGVEQLEEEPPEL

SEQ ID NO: 2811 - protein, 242 aa, unidentified
  REGION 1..242: note = Description of Unknown: Synthetic polypeptide
RVAAVDIEVYNPKGAPRSSKDEIIMISVATSDGVEKVLTWREVQGLEQVEVLQDEKEMLLRFAELIKEGDYDVIVGYNTDSFDFPYIRDRLKKLGISLPLGRLDAELEVSRRGALPEARIRGRAHVDLYPIVRRHVKLNSYVLESVVEELLGIKKEKLDGERLFTYWDEGGEKRALLARYALEDARVTLALAEKFLPLYCELSTIVGQSLNDVARMTSGQLVEWLLMRYATPRGELIPNHPA

SEQ ID NO: 2812 - protein, 235 aa, unidentified
  REGION 1..235: note = Description of Unknown: Synthetic polypeptide
EEYAARARATYAGGYVREPKRGLVEHIAVFDFRSLYPSIIVSHNIDPSTLIVGNCEENRAPELEYCFSLEREGFIPAILKELIRRRAEIKRELKRSEGDRRRTLSFAEKALKILANSFYGYMGYPRARWYRRECAESVAAFARMYIKQVMRIAEEEFKLEVVYGDTDSLFVVIPPEKRELAQKFLQKVNESMPGIIELEFEGFYRRGLFVTKKRYALLSEDGKMVVKGLEFVRRD

SEQ ID NO: 2813 - protein, 53 aa, unidentified
  REGION 1..53: note = Description of Unknown: Synthetic polypeptide
EREGFIPAILKELIRRRAEIKRELKRSEGDRRRTLSFAEKALKILANSFYGYM

SEQ ID NO: 2814 - protein, 152 aa, unidentified
  REGION 1..152: note = Description of Unknown: Synthetic polypeptide
WAPIARETQKEVLRILLEEADPEKAARLVRDVIERIRQRRVSLEDITIYTQLTKRIKSYKSLEPHVVAAQKLKERGREVAPGMIIGYIITKGTKGISQRATPVEFARLEDYDPEYYIDNQILPAIQRIFEAIGYTRDYLKEGITQTSLSRWF

SEQ ID NO: 2815 - protein, 10 aa, unidentified
  REGION 1..10: note = Description of Unknown: Synthetic polypeptide
MGSSHHHHHH

SEQ ID NO: 2816 - protein, 12 aa, unidentified
  REGION 1..12: note = Description of Unknown: Synthetic polypeptide
MGSSHHHHHHGS

SEQ ID NO: 2817 - protein, 13 aa, unidentified
  REGION 1..13: note = Description of Unknown: Synthetic polypeptide
MGSSHHHHHHSSG

SEQ ID NO: 2818 - protein, 12 aa, unidentified
  REGION 1..12: note = Description of Unknown: Synthetic polypeptide
MGSDKIHHHHHH

SEQ ID NO: 2819 - protein, 8 aa, unidentified
  REGION 1..8: note = Description of Unknown: Synthetic polypeptide
MAHHHHHH

SEQ ID NO: 2820 - protein, 7 aa, unidentified
  REGION 1..7: note = Description of Unknown: Synthetic polypeptide
MHHHHHH

SEQ ID NO: 2821 - protein, 11 aa, unidentified
  REGION 1..11: note = Description of Unknown: Synthetic polypeptide
MRGSPHHHHHH

SEQ ID NO: 2822 - protein, 10 aa, unidentified
  REGION 1..10: note = Description of Unknown: Synthetic polypeptide
MRGSHHHHHH

SEQ ID NO: 2823 - protein, 10 aa, unidentified
  REGION 1..10: note = Description of Unknown: Synthetic polypeptide
MHHHHHHSSG

SEQ ID NO: 2824 - protein, 8 aa, unidentified
  REGION 1..8: note = Description of Unknown: Synthetic polypeptide
GGHHHHHH

SEQ ID NO: 2825 - protein, 13 aa, unidentified
  REGION 1..13: note = Description of Unknown: Synthetic polypeptide
MFGSDKIHHHHHH

SEQ ID NO: 2826 - protein, 13 aa, unidentified
  REGION 1..13: note = Description of Unknown: Synthetic polypeptide
MPGSDKIHHHHHH

SEQ ID NO: 2827 - protein, 13 aa, unidentified
  REGION 1..13: note = Description of Unknown: Synthetic polypeptide
MFGSSHHHHHHGS

SEQ ID NO: 2828 - protein, 13 aa, unidentified
  REGION 1..13: note = Description of Unknown: Synthetic polypeptide
MPGSSHHHHHHGS

SEQ ID NO: 2829 - protein, 12 aa, unidentified
  REGION 1..12: note = Description of Unknown: Synthetic polypeptide
MFRGSPHHHHHH

SEQ ID NO: 2830 - protein, 12 aa, unidentified
  REGION 1..12: note = Description of Unknown: Synthetic polypeptide
MPRGSPHHHHHH

SEQ ID NO: 2831 - protein, 11 aa, unidentified
  REGION 1..11: note = Description of Unknown: Synthetic polypeptide
MFRGSHHHHHH

SEQ ID NO: 2832 - protein, 11 aa, unidentified
  REGION 1..11: note = Description of Unknown: Synthetic polypeptide
MPRGSHHHHHH

SEQ ID NO: 2833 - protein, 6 aa, unidentified
  REGION 1..6: note = Description of Unknown: Synthetic polypeptide
LVPRGS

SEQ ID NO: 2834 - protein, 8 aa, unidentified
  REGION 1..8: note = Description of Unknown: Synthetic polypeptide
LVPRAGSH

SEQ ID NO: 2835 - protein, 8 aa, unidentified
  REGION 1..8: note = Description of Unknown: Synthetic polypeptide
LVPRGGSH

SEQ ID NO: 2836 - protein, 8 aa, unidentified
  REGION 1..8: note = Description of Unknown: Synthetic polypeptide
LVPRSGSH

SEQ ID NO: 2837 - protein, 20 aa, unidentified
  REGION 1..20: note = Description of Unknown: Synthetic polypeptide
MGSSHHHHHHSSGLVPRGSH

SEQ ID NO: 2838 - protein, 19 aa, unidentified
  REGION 1..19: note = Description of Unknown: Synthetic polypeptide
MGSSHHHHHHSSGLVPRGS

SEQ ID NO: 2839 - protein, 26 aa, unidentified
  REGION 1..26: note = Description of Unknown: Synthetic polypeptide
MGSSHHHHHHSSGLHHRSGLVPRGSH

SEQ ID NO: 2840 - protein, 19 aa, unidentified
  REGION 1..19: note = Description of Unknown: Synthetic polypeptide
MGSSHHHHHHSSGLVPRQS

SEQ ID NO: 2841 - protein, 20 aa, unidentified
  REGION 1..20: note = Description of Unknown: Synthetic polypeptide
MGSSHHHHHHSSGLVPGGSH

SEQ ID NO: 2842 - protein, 21 aa, unidentified
  REGION 1..21: note = Description of Unknown: Synthetic polypeptide
MGSSHHHHHHSSGLVPRAGSH

SEQ ID NO: 2843 - protein, 21 aa, unidentified
  REGION 1..21: note = Description of Unknown: Synthetic polypeptide
MGSSHHHHHHSSGLVPRGGSH

SEQ ID NO: 2844 - protein, 21 aa, unidentified
  REGION 1..21: note = Description of Unknown: Synthetic polypeptide
MGSSHHHHHHSSGLVPRSGSH

SEQ ID NO: 2845 - protein, 21 aa, unidentified
  REGION 1..21: note = Description of Unknown: Synthetic polypeptide
MGSSHHHHHHSSGLVPRSGSH

SEQ ID NO: 2846 - protein, 21 aa, unidentified
  REGION 1..21: note = Description of Unknown: Synthetic polypeptide
MFGSSHHHHHHSSGLVPRGSH

SEQ ID NO: 2847 - protein, 21 aa, unidentified
  REGION 1..21: note = Description of Unknown: Synthetic polypeptide
MPGSSHHHHHHSSGLVPRGSH

SEQ ID NO: 2848 - protein, 19 aa, unidentified
  REGION 1..19: note = Description of Unknown: Synthetic polypeptide
MPSSHHHHHHSSGLVPRGS

SEQ ID NO: 2849 - protein, 20 aa, unidentified
  REGION 1..20: note = Description of Unknown: Synthetic polypeptide
MPGSSHHHHHHSSGLVPRGS

SEQ ID NO: 2850 - protein, 6 aa, synthetic construct
HHHHHH

SEQ ID NO: 2851 - protein, 10 aa, synthetic construct
  VARIANT 1..10: note = This sequence may encompass 3-10 repeating residues
HHHHHHHHHH
